(19) United States
(12) Patent Application Publication
(10) Pub. No.: US 2023/0201243 A1
(43) Pub. Date: Jun. 29, 2023

(54) MODULATORS OF FOXP3 EXPRESSION

(71) Applicant: Ionis Pharmaceuticals, Inc., Carlsbad, CA (US)

(72) Inventors: Alexey M. REVENKO, San Diego, CA (US); Robert A. MACLEOD, Carlsbad, CA (US); Susan M. FREIER, Carlsbad, CA (US)

(73) Assignee: Ionis Pharmaceuticals, Inc., Carlsbad, CA (US)

(21) Appl. No.: 18/059,707

(22) Filed: Nov. 29, 2022

Related U.S. Application Data
(62) Division of application No. 16/684,271, filed on Nov. 14, 2019, now Pat. No. 11,547,718.
(60) Provisional application No. 62/924,001, filed on Oct. 21, 2019.
(60) Provisional application No. 62/767,123, filed on Nov. 14, 2018.

(51) Int. Cl. A61K 31/7125; A61P 35/00; C12N 15/113

(52) U.S. Cl. CPC A61K 31/7125; A61P 35/00; C12N 15/113; C12N 2310/315; C12N 2310/34; C12N 2310/14; C12N 2310/11; C12N 2310/3231; C12N 2310/344; C12N 2310/3525

(57) ABSTRACT

The present embodiments provide methods, compounds, and compositions useful for inhibiting FOXP3 expression, which may be useful for treating, preventing, or ameliorating cancer.

### SEQUENCE LISTING

[0001] The present application is being filed along with a Sequence Listing in electronic format. The Sequence Listing is provided as a file entitled 200819 Sequence Listing.xml created Nov. 21, 2022, which is 4.09 MB in size. The information in the electronic format of the sequence listing is incorporated herein by reference in its entirety.

### FIELD

[0002] The present embodiments provide methods, compounds, and compositions useful for inhibiting FOXP3 expression, which can be useful for treating, preventing, or ameliorating cancer.

### BACKGROUND

[0003] Foxp3 is a lineage-defining transcription factor for regulatory T cells (Tregs) that controls a restricted set of genes associated with immunosuppression. Tregs suppress immunity (including anti-tumor immunity) via multiple effector mechanisms. The presence of Tregs within the tumor has poor prognostic outcome in multiple types of cancer. Tregs do not possess a known unique surface marker or signalling protein which could enable targeting with biologics. FOXP3 cannot be targeted by monoclonal antibodies or with conventional small molecules.

### SUMMARY

[0004] Certain embodiments provided herein are directed to potent and tolerable compounds and compositions useful for inhibiting FOXP3 expression, which can be useful for treating, preventing, ameliorating, or slowing progression of cancer. In certain embodiments, the cancer is associated with an immunosuppressive microenvironment or stroma. Certain embodiments are directed to compounds and compositions useful for inhibiting FOXP3 expression in Tregs, which can be useful for treating, preventing, ameliorating, or slowing progression of cancer associated with immunosuppresive Tregs.

### DETAILED DESCRIPTION

[0005] It is to be understood that both the foregoing general description and the following detailed description are exemplary and explanatory only and are not restrictive of the embodiments, as claimed. Herein, the use of the singular includes the plural unless specifically stated otherwise. As used herein, the use of “or” means “and/or” unless stated otherwise. Furthermore, the use of the term “including” as well as other forms, such as “includes” and “included”, is not limiting.

[0006] The section headings used herein are for organizational purposes only and are not to be construed as limiting the subject matter described. All documents, or portions of documents, cited in this application, including, but not limited to, patents, patent applications, articles, books, treatises, and GenBank and NCBI reference sequence records are hereby expressly incorporated by reference for the portions of the document discussed herein, as well as in their entirety.

[0007] It is understood that the sequence set forth in each SEQ ID NO in the examples contained herein is independent of any modification to a sugar moiety, an internucleoside linkage, or a nucleobase. As such, compounds defined by a SEQ ID NO may comprise, independently, one or more modifications to a sugar moiety, an internucleoside linkage, or a nucleobase. Compounds described by ION number indicate a combination of nucleobase sequence, chemical modification, and motif.

[0008] Unless otherwise indicated, the following terms have the following meanings:

[0009] “2′-deoxynucleoside” means a nucleoside comprising 2′-H(H) furanosyl sugar moiety, as found in naturally occurring deoxyribonucleic acids (DNA). In certain embodiments, a 2′-deoxynucleoside may comprise a modified nucleobase or may comprise an RNA nucleobase (uracil).

[0010] “2′-O-methoxyethyl” (also 2′-MOE and 2′-O(CH₂)₂—OCH₃) refers to an O-methoxy-ethyl modification at the 2′ position of a furanosyl ring. A 2′-O-methoxyethyl modified sugar is a modified sugar.

[0011] “2′-MOE nucleoside” (also 2′-O-methoxyethyl nucleoside) means a nucleoside comprising a 2′-MOE modified sugar moiety.

[0012] “2′-substituted nucleoside” or “2-modified nucleoside” means a nucleoside comprising a 2′-substituted or 2′-modified sugar moiety. As used herein, “2′-substituted” or “2-modified” in reference to a sugar moiety means a sugar moiety comprising at least one 2′-substituent group other than H or OH.

[0013] “3′ target site” refers to the nucleotide of a target nucleic acid which is complementary to the 3′-most nucleotide of a particular compound.

[0014] “5′ target site” refers to the nucleotide of a target nucleic acid which is complementary to the 5′-most nucleotide of a particular compound.

[0015] “5-methylcytosine” means a cytosine with a methyl group attached to the 5 position.

[0016] “About” means within ±10% of a value. For example, if it is stated, “the compounds affected about 70% inhibition of FOXP3”, it is implied that FOXP3 levels are inhibited within a range of 60% and 80%.

[0017] “Administration” or “administering” refers to routes of introducing a compound or composition provided herein to an individual to perform its intended function. An example of a route of administration that can be used includes, but is not limited to parenteral administration, such as subcutaneous, intravenous, or intramuscular injection or infusion.

[0018] “Administered concomitantly” or “co-administration” means administration of two or more compounds in any manner in which the pharmacological effects of both are manifest in the patient. Concomitant administration does not require that both compounds be administered in a single pharmaceutical composition, in the same dosage form, by the same route of administration, or at the same time. The effects of both compounds need not manifest themselves at the same time. The effects need only be overlapping for a period of time and need not be coextensive. Concomitant administration or co-administration encompasses administration in parallel or sequentially.

[0019] “Amelioration” refers to an improvement or lessening of at least one indicator, sign, or symptom of an associated disease, disorder, or condition. In certain embodiments, amelioration includes a delay or slowing in the progression or severity of one or more indicators of a condition or disease. The progression or severity of indicators may be determined by subjective or objective measures, which are known to those skilled in the art.

[0020] “Animal” refers to a human or non-human animal, including, but not limited to, mice, rats, rabbits, dogs, cats, pigs, and non-human primates, including, but not limited to, monkeys and chimpanzees.

[0021] “Antibody,” as used in this disclosure, refers to an immunoglobulin or a fragment or a derivative thereof, and encompasses any polypeptide comprising an antigen-binding site, regardless of whether it is produced in vitro or in vivo. The term includes, but is not limited to, polyclonal, monoclonal, monospecific, polyspecific, non-specific, humanized, single-chain, chimeric, synthetic, recombinant, hybrid, mutated, and grafted antibodies. Unless otherwise modified by the term “intact,” as in “intact antibodies,” for the purposes of this disclosure, the term “antibody” also includes antibody fragments such as Fab, F(ab′)2, Fv, scFv, Fd, dAb, and other antibody fragments that retain antigen-binding function, i.e., the ability to bind, for example, CTLA-4 or PD-L1 specifically. Typically, such fragments would comprise an antigen-binding domain.

[0022] “Anti-CTLA-4 antibody” refers to an antibody or antigen binding fragment thereof that specifically binds a CTLA-4 polypeptide. Exemplary anti-CTLA-4 antibodies are described for example at U.S. Pat. Nos. 6,682,736; 7,109,003; 7,123,281; 7,411,057; 7,824,679; 8,143,379; 7,807,797; and 8,491,895 (Tremelimumab is 11.2.1, therein), which are herein incorporated by reference. Tremelimumab (U.S. Pat. No. 6,682,736) is an exemplary anti-CTLA-4 antibody.

[0023] “Anti-OX40 antibody” refers to an antibody or antigen binding fragment thereof that specifically binds OX40. OX40 antibodies include monoclonal and polyclonal antibodies that are specific for OX40 and antigen-binding fragments thereof. In certain aspects, anti-OX40 antibodies as described herein are monoclonal antibodies (or antigen-binding fragments thereof), e.g., murine, humanized, or fully human monoclonal antibodies. In one particular embodiment, the OX40 antibody is an OX40 receptor agonist, such as the mouse anti-human OX40 monoclonal antibody (9B12) described by Weinberg et al., J Immunother 29, 575-585 (2006). In another embodiment, an OX40 antibody is MEDI0562 as described in US 2016/0137740, incorporated herein by reference. In other embodiments, the antibody which specifically binds to OX40, or an antigen-binding fragment thereof, binds to the same OX40 epitope as mAb 9B12.

[0024] “Anti-PD-L1 antibody” refers to an antibody or antigen binding fragment thereof that specifically binds a PD-L1 polypeptide. Exemplary anti-PD-L1 antibodies are described for example at US2013/0034559, U.S. Pat. Nos. 8,779,108 and 9,493,565 which are herein incorporated by reference. Durvalumab (MEDI4736) is an exemplary anti-PD-L1 antibody. Other anti-PD-L1 antibodies include BMS-936559 (Bristol-Myers Squibb) and MPDL3280A (atezolizumab) (Roche).

[0025] “Anti-PD-1 antibody” refers to an antibody or antigen binding fragment thereof that specifically binds a PD-1 polypeptide. Exemplary anti-PD-1 antibodies are described for example at U.S. Pat. Nos. 7,521,051; 8,008,449; 8,354,509; 9,073,994; 9,393,301; 9,402,899; and 9,439,962, which are herein incorporated by reference. Exemplary anti-PD-1 antibodies include, without limitation, nivolumab, pembrolizumab, pidilizumab, and AMP-514.

[0026] “Antigen-binding domain,” “antigen-binding fragment,” and “binding fragment” refer to a part of an antibody molecule that comprises amino acids responsible for the specific binding between the antibody and the antigen. In instances, where an antigen is large, the antigen-binding domain may only bind to a part of the antigen. A portion of the antigen molecule that is responsible for specific interactions with the antigen-binding domain is referred to as “epitope” or “antigenic determinant.” An antigen-binding domain typically comprises an antibody light chain variable region (VL) and an antibody heavy chain variable region (VH), however, it does not necessarily have to comprise both. For example, a so-called Fd antibody fragment consists only of a VH domain, but still retains some antigen-binding function of the intact antibody. Binding fragments of an antibody are produced by recombinant DNA techniques, or by enzymatic or chemical cleavage of intact antibodies. Binding fragments include Fab, Fab′, F(ab′)2, Fv, and single-chain antibodies. An antibody other than a “bispecific” or “bifunctional” antibody is understood to have each of its binding sites identical. Digestion of antibodies with the enzyme, papain, results in two identical antigen-binding fragments, known also as “Fab” fragments, and a “Fc” fragment, having no antigen-binding activity but having the ability to crystallize. Digestion of antibodies with the enzyme, pepsin, results in the a F(ab′)2 fragment in which the two arms of the antibody molecule remain linked and comprise two-antigen binding sites. The F(ab′)2 fragment has the ability to crosslink antigen. “Fv” when used herein refers to the minimum fragment of an antibody that retains both antigen-recognition and antigen-binding sites. “Fab” when used herein refers to a fragment of an antibody that comprises the constant domain of the light chain and the CHI domain of the heavy chain.

[0027] “mAb” refers to monoclonal antibody. Antibodies of the present disclosure comprise without limitation whole native antibodies, bispecific antibodies; chimeric antibodies; Fab, Fab′, single chain V region fragments (scFv), fusion polypeptides, and unconventional antibodies.

[0028] “Antisense activity” means any detectable and/or measurable activity attributable to the hybridization of an antisense compound to its target nucleic acid. In certain embodiments, antisense activity is a decrease in the amount or expression of a target nucleic acid or protein encoded by such target nucleic acid compared to target nucleic acid levels or target protein levels in the absence of the antisense compound to the target.

[0029] “Antisense compound” means a compound comprising an oligonucleotide and optionally one or more additional features, such as a conjugate group or terminal group. Examples of antisense compounds include single-stranded and double-stranded compounds, such as, oligonucleotides, ribozymes, siRNAs, shRNAs, ssRNAs, and occupancy-based compounds.

[0030] “Antisense inhibition” means reduction of target nucleic acid levels in the presence of an antisense compound complementary to a target nucleic acid compared to target nucleic acid levels in the absence of the antisense compound.

[0031] “Antisense mechanisms” are all those mechanisms involving hybridization of a compound with target nucleic acid, wherein the outcome or effect of the hybridization is either target degradation or target occupancy with concomitant stalling of the cellular machinery involving, for example, transcription or splicing.

[0032] “Antisense oligonucleotide” means an oligonucleotide having a nucleobase sequence that is complementary to a target nucleic acid or region or segment thereof. In certain embodiments, an antisense oligonucleotide is specifically hybridizable to a target nucleic acid or region or segment thereof.

[0033] “Bicyclic nucleoside” or “BNA” means a nucleoside comprising a bicyclic sugar moiety. “Bicyclic sugar” or “bicyclic sugar moiety” means a modified sugar moiety comprising two rings, wherein the second ring is formed via a bridge connecting two of the atoms in the first ring thereby forming a bicyclic structure. In certain embodiments, the first ring of the bicyclic sugar moiety is a furanosyl moiety. In certain embodiments, the bicyclic sugar moiety does not comprise a furanosyl moiety.

[0034] “Branching group” means a group of atoms having at least 3 positions that are capable of forming covalent linkages to at least 3 groups. In certain embodiments, a branching group provides a plurality of reactive sites for connecting tethered ligands to an oligonucleotide via a conjugate linker and/or a cleavable moiety.

[0035] “Cell-targeting moiety” means a conjugate group or portion of a conjugate group that is capable of binding to a particular cell type or particular cell types.

[0036] “cEt” or “constrained ethyl” means a bicyclic furanosyl sugar moiety comprising a bridge connecting the 4′-carbon and the 2′-carbon, wherein the bridge has the formula: 4′-CH(CH₃)—O-2′.

[0037] “cEt nucleoside” means a nucleoside comprising a cEt modified sugar moiety.

[0038] “Chemical modification” in a compound describes the substitutions or changes through chemical reaction, of any of the units in the compound relative to the original state of such unit. “Modified nucleoside” means a nucleoside having, independently, a modified sugar moiety and/or modified nucleobase. “Modified oligonucleotide” means an oligonucleotide comprising at least one modified internucleoside linkage, a modified sugar, and/or a modified nucleobase.

[0039] “Chemically distinct region” refers to a region of a compound that is in some way chemically different than another region of the same compound. For example, a region having 2′-O-methoxyethyl nucleotides is chemically distinct from a region having nucleotides without 2′-O-methoxyethyl modifications.

[0040] “Chimeric antisense compounds” means antisense compounds that have at least 2 chemically distinct regions, each position having a plurality of subunits.

[0041] “Chirally enriched population” means a plurality of molecules of identical molecular formula, wherein the number or percentage of molecules within the population that contain a particular stereochemical configuration at a particular chiral center is greater than the number or percentage of molecules expected to contain the same particular stereochemical configuration at the same particular chiral center within the population if the particular chiral center were stereorandom. Chirally enriched populations of molecules having multiple chiral centers within each molecule may contain one or more stereorandom chiral centers. In certain embodiments, the molecules are modified oligonucleotides. In certain embodiments, the molecules are compounds comprising modified oligonucleotides.

[0042] “Cleavable bond” means any chemical bond capable of being split. In certain embodiments, a cleavable bond is selected from among: an amide, a polyamide, an ester, an ether, one or both esters of a phosphodiester, a phosphate ester, a carbamate, a di-sulfide, or a peptide.

[0043] “Cleavable moiety” means a bond or group of atoms that is cleaved under physiological conditions, for example, inside a cell, an animal, or a human.

[0044] “Complementary” in reference to an oligonucleotide means the nucleobase sequence of such oligonucleotide or one or more regions thereof matches the nucleobase sequence of another oligonucleotide or nucleic acid or one or more regions thereof when the two nucleobase sequences are aligned in opposing directions. Nucleobase matches or complementary nucleobases, as described herein, are limited to the following pairs: adenine (A) and thymine (T), adenine (A) and uracil (U), cytosine (C) and guanine (G), and 5-methyl cytosine (^{m}C) and guanine (G) unless otherwise specified. Complementary oligonucleotides and/or nucleic acids need not have nucleobase complementarity at each nucleoside and may include one or more nucleobase mismatches. By contrast, “fully complementary” or “100% complementary” in reference to oligonucleotides means that such oligonucleotides have nucleobase matches at each nucleoside without any nucleobase mismatches.

[0045] “Conjugate group” means a group of atoms that is attached to an oligonucleotide. Conjugate groups include a conjugate moiety and a conjugate linker that attaches the conjugate moiety to the oligonucleotide.

[0046] “Conjugate linker” means a group of atoms comprising at least one bond that connects a conjugate moiety to an oligonucleotide.

[0047] “Conjugate moiety” means a group of atoms that is attached to an oligonucleotide via a conjugate linker.

[0048] “Contiguous” in the context of an oligonucleotide refers to nucleosides, nucleobases, sugar moieties, or internucleoside linkages that are immediately adjacent to each other. For example, “contiguous nucleobases” means nucleobases that are immediately adjacent to each other in a sequence.

[0049] “Designing” or “Designed to” refer to the process of designing a compound that specifically hybridizes with a selected nucleic acid molecule.

[0050] “Diluent” means an ingredient in a composition that lacks pharmacological activity, but is pharmaceutically necessary or desirable. For example, the diluent in an injected composition can be a liquid, e.g. saline solution.

[0051] “Differently modified” means chemical modifications or chemical substituents that are different from one another, including absence of modifications. Thus, for example, a MOE nucleoside and an unmodified DNA nucleoside are “differently modified,” even though the DNA nucleoside is unmodified. Likewise, DNA and RNA are “differently modified,” even though both are naturally-occurring unmodified nucleosides. Nucleosides that are the same but for comprising different nucleobases are not differently modified. For example, a nucleoside comprising a 2′-OMe modified sugar and an unmodified adenine nucleobase and a nucleoside comprising a 2′-OMe modified sugar and an unmodified thymine nucleobase are not differently modified.

[0052] “Dose” means a specified quantity of a compound or pharmaceutical agent provided in a single administration, or in a specified time period. In certain embodiments, a dose may be administered in two or more boluses, tablets, or injections. For example, in certain embodiments, where subcutaneous administration is desired, the desired dose may require a volume not easily accommodated by a single injection. In such embodiments, two or more injections may be used to achieve the desired dose. In certain embodiments, a dose may be administered in two or more injections to minimize injection site reaction in an individual. In other embodiments, the compound or pharmaceutical agent is administered by infusion over an extended period of time or continuously. Doses may be stated as the amount of pharmaceutical agent per hour, day, week or month.

[0053] “Dosing regimen” is a combination of doses designed to achieve one or more desired effects.

[0054] “Double-stranded antisense compound” means an antisense compound comprising two oligomeric compounds that are complementary to each other and form a duplex, and wherein one of the two said oligomeric compounds comprises an oligonucleotide.

[0055] “Effective amount” means the amount of compound sufficient to effectuate a desired physiological outcome in an individual in need of the compound. The effective amount may vary among individuals depending on the health and physical condition of the individual to be treated, the taxonomic group of the individuals to be treated, the formulation of the composition, assessment of the individual's medical condition, and other relevant factors.

[0056] “Efficacy” means the ability to produce a desired effect.

[0057] “Expression” includes all the functions by which a gene's coded information is converted into structures present and operating in a cell. Such structures include, but are not limited to, the products of transcription and translation.

[0058] “Gapmer” means an oligonucleotide comprising an internal region having a plurality of nucleosides that support RNase H cleavage positioned between external regions having one or more nucleosides, wherein the nucleosides comprising the internal region are chemically distinct from the nucleoside or nucleosides comprising the external regions. The internal region may be referred to as the “gap” and the external regions may be referred to as the “wings.”

[0059] “Hybridization” means the annealing of oligonucleotides and/or nucleic acids. While not limited to a particular mechanism, the most common mechanism of hybridization involves hydrogen bonding, which may be Watson-Crick, Hoogsteen or reversed Hoogsteen hydrogen bonding, between complementary nucleobases. In certain embodiments, complementary nucleic acid molecules include, but are not limited to, an antisense compound and a nucleic acid target. In certain embodiments, complementary nucleic acid molecules include, but are not limited to, an oligonucleotide and a nucleic acid target.

[0060] “Immediately adjacent” means there are no intervening elements between the immediately adjacent elements of the same kind (e.g. no intervening nucleobases between the immediately adjacent nucleobases).

[0061] “Immune checkpoint inhibitor” means an agent that inhibits the expression or activity of a protein that inhibits an immune response. In one embodiment, an immune checkpoint inhibitor is an agent that inhibits the CTLA-4 or PD-1 pathways. Particular checkpoint inhibitors include antibodies that inhibit PD-1, PD-L1 or CTLA-4.

[0062] “Immunomodulatory agent” means an agent that enhances an immune response (e.g., anti-tumor immune response). Exemplary immunomodulatory agents of the present disclosure include antibodies, such as an anti-CTLA-4 antibody, an anti-PD-L1 antibody, an anti-PD-1 antibody and antigenic fragments of any of these, and OX40 agonists, including proteins, such as OX40 ligand fusion protein, OX40 antibody, or fragments thereof. In one embodiment, the immunomodulatory agent is an immune checkpoint inhibitor.

[0063] “Individual” means a human or non-human animal selected for treatment or therapy.

[0064] “Inhibiting the expression or activity” refers to a reduction or blockade of the expression or activity relative to the expression of activity in an untreated or control sample and does not necessarily indicate a total elimination of expression or activity.

[0065] “Internucleoside linkage” means a group or bond that forms a covalent linkage between adjacent nucleosides in an oligonucleotide. “Modified internucleoside linkage” means any internucleoside linkage other than a naturally occurring, phosphate internucleoside linkage. Non-phosphate linkages are referred to herein as modified internucleoside linkages.

[0066] “Lengthened oligonucleotides” are those that have one or more additional nucleosides relative to an oligonucleotide disclosed herein, e.g. a parent oligonucleotide.

[0067] “Linked nucleosides” means adjacent nucleosides linked together by an internucleoside linkage.

[0068] “Linker-nucleoside” means a nucleoside that links an oligonucleotide to a conjugate moiety. Linker-nucleosides are located within the conjugate linker of a compound. Linker-nucleosides are not considered part of the oligonucleotide portion of a compound even if they are contiguous with the oligonucleotide.

[0069] “Mismatch” or “non-complementary” means a nucleobase of a first oligonucleotide that is not complementary to the corresponding nucleobase of a second oligonucleotide or target nucleic acid when the first and second oligonucleotides are aligned. For example, nucleobases including but not limited to a universal nucleobase, inosine, and hypoxanthine, are capable of hybridizing with at least one nucleobase but are still mismatched or non-complementary with respect to nucleobase to which it hybridized. As another example, a nucleobase of a first oligonucleotide that is not capable of hybridizing to the corresponding nucleobase of a second oligonucleotide or target nucleic acid when the first and second oligonucleotides are aligned is a mismatch or non-complementary nucleobase.

[0070] “Modulating” refers to changing or adjusting a feature in a cell, tissue, organ or organism. For example, modulating FOXP3 RNA can mean to increase or decrease the level of FOXP3 RNA and/or FOXP3 protein in a cell, tissue, organ or organism. A “modulator” effects the change in the cell, tissue, organ or organism. For example, a FOXP3 compound can be a modulator that decreases the amount of FOXP3 RNA and/or FOXP3 protein in a cell, tissue, organ or organism.

[0071] “MOE” means methoxyethyl.

[0072] “Monomer” refers to a single unit of an oligomer. Monomers include, but are not limited to, nucleosides and nucleotides.

[0073] “Motif” means the pattern of unmodified and/or modified sugar moieties, nucleobases, and/or internucleoside linkages, in an oligonucleotide.

[0074] “Natural” or “naturally occurring” means found in nature.

[0075] “Non-bicyclic modified sugar” or “non-bicyclic modified sugar moiety” means a modified sugar moiety that comprises a modification, such as a substituent, that does not form a bridge between two atoms of the sugar to form a second ring.

[0076] “Nucleic acid” refers to molecules composed of monomeric nucleotides. A nucleic acid includes, but is not limited to, ribonucleic acids (RNA), deoxyribonucleic acids (DNA), single-stranded nucleic acids, and double-stranded nucleic acids.

[0077] “Nucleobase” means a heterocyclic moiety capable of pairing with a base of another nucleic acid. As used herein a “naturally occurring nucleobase” is adenine (A), thymine (T), cytosine (C), uracil (U), and guanine (G). A “modified nucleobase” is a naturally occurring nucleobase that is chemically modified. A “universal base” or “universal nucleobase” is a nucleobase other than a naturally occurring nucleobase and modified nucleobase, and is capable of pairing with any nucleobase.

[0078] “Nucleobase sequence” means the order of contiguous nucleobases in a nucleic acid or oligonucleotide independent of any sugar or internucleoside linkage.

[0079] “Nucleoside” means a compound comprising a nucleobase and a sugar moiety. The nucleobase and sugar moiety are each, independently, unmodified or modified. “Modified nucleoside” means a nucleoside comprising a modified nucleobase and/or a modified sugar moiety. Modified nucleosides include abasic nucleosides, which lack a nucleobase.

[0080] “Oligomeric compound” means a compound comprising a single oligonucleotide and optionally one or more additional features, such as a conjugate group or terminal group.

[0081] “Oligonucleotide” means a polymer of linked nucleosides each of which can be modified or unmodified, independent one from another. Unless otherwise indicated, oligonucleotides consist of 8-80 linked nucleosides. “Modified oligonucleotide” means an oligonucleotide, wherein at least one sugar, nucleobase, or internucleoside linkage is modified. “Unmodified oligonucleotide” means an oligonucleotide that does not comprise any sugar, nucleobase, or internucleoside modification.

[0082] “Parent oligonucleotide” means an oligonucleotide whose sequence is used as the basis of design for more oligonucleotides of similar sequence but with different lengths, motifs, and/or chemistries. The newly designed oligonucleotides may have the same or overlapping sequence as the parent oligonucleotide.

[0083] “Parenteral administration” means administration through injection or infusion. Parenteral administration includes subcutaneous administration, intravenous administration, intramuscular administration, intraarterial administration, intraperitoneal administration, or intracranial administration, e.g. intrathecal or intracerebroventricular administration.

[0084] “Pharmaceutically acceptable carrier or diluent” means any substance suitable for use in administering to an individual. For example, a pharmaceutically acceptable carrier can be a sterile aqueous solution, such as PBS or water-for-injection.

[0085] “Pharmaceutically acceptable salts” means physiologically and pharmaceutically acceptable salts of compounds, such as oligomeric compounds or oligonucleotides, i.e., salts that retain the desired biological activity of the parent compound and do not impart undesired toxicological effects thereto.

[0086] “Pharmaceutical agent” means a compound that provides a therapeutic benefit when administered to an individual.

[0087] “Pharmaceutical composition” means a mixture of substances suitable for administering to an individual. For example, a pharmaceutical composition may comprise one or more compounds or salt thereof and a sterile aqueous solution.

[0088] “Phosphorothioate linkage” means a modified phosphate linkage in which one of the non-bridging oxygen atoms is replaced with a sulfur atom. A phosphorothioate internucleoside linkage is a modified internucleoside linkage.

[0089] “Phosphorus moiety” means a group of atoms comprising a phosphorus atom. In certain embodiments, a phosphorus moiety comprises a mono-, di-, or tri-phosphate, or phosphorothioate.

[0090] “Portion” means a defined number of contiguous (i.e., linked) nucleobases of a nucleic acid. In certain embodiments, a portion is a defined number of contiguous nucleobases of a target nucleic acid. In certain embodiments, a portion is a defined number of contiguous nucleobases of an oligomeric compound.

[0091] “Prevent” refers to delaying or forestalling the onset, development or progression of a disease, disorder, or condition for a period of time from minutes to indefinitely.

[0092] “Prodrug” means a compound in a form outside the body which, when administered to an individual, is metabolized to another form within the body or cells thereof. In certain embodiments, the metabolized form is the active, or more active, form of the compound (e.g., drug). Typically conversion of a prodrug within the body is facilitated by the action of an enzyme(s) (e.g., endogenous or viral enzyme) or chemical(s) present in cells or tissues, and/or by physiologic conditions.

[0093] “Reduce” means to bring down to a smaller extent, size, amount, or number.

[0094] “RefSeq No.” is a unique combination of letters and numbers assigned to a sequence to indicate the sequence is for a particular target transcript (e.g., target gene). Such sequence and information about the target gene (collectively, the gene record) can be found in a genetic sequence database. Genetic sequence databases include the NCBI Reference Sequence database, GenBank, the European Nucleotide Archive, and the DNA Data Bank of Japan (the latter three forming the International Nucleotide Sequence Database Collaboration or INSDC).

[0095] “Region” is defined as a portion of the target nucleic acid having at least one identifiable structure, function, or characteristic.

[0096] “RNAi compound” means an antisense compound that acts, at least in part, through RISC or Ago2, but not through RNase H, to modulate a target nucleic acid and/or protein encoded by a target nucleic acid. RNAi compounds include, but are not limited to double-stranded siRNA, single-stranded RNA (ssRNA), and microRNA, including microRNA mimics.

[0097] “Segments” are defined as smaller or sub-portions of regions within a nucleic acid.

[0098] “Side effects” means physiological disease and/or conditions attributable to a treatment other than the desired effects. In certain embodiments, side effects include injection site reactions, liver function test abnormalities, renal function abnormalities, liver toxicity, renal toxicity, central nervous system abnormalities, myopathies, and malaise. For example, increased aminotransferase levels in serum may indicate liver toxicity or liver function abnormality. For example, increased bilirubin may indicate liver toxicity or liver function abnormality.

[0099] “Single-stranded” in reference to a compound means the compound has only one oligonucleotide. “Self-complementary” means an oligonucleotide that at least partially hybridizes to itself. A compound consisting of one oligonucleotide, wherein the oligonucleotide of the compound is self-complementary, is a single-stranded compound. A single-stranded compound may be capable of binding to a complementary compound to form a duplex.

[0100] “Sites” are defined as unique nucleobase positions within a target nucleic acid.

[0101] “Specifically hybridizable” refers to an oligonucleotide having a sufficient degree of complementarity between the oligonucleotide and a target nucleic acid to induce a desired effect, while exhibiting minimal or no effects on non-target nucleic acids. In certain embodiments, specific hybridization occurs under physiological conditions.

[0102] “Specifically inhibit” with reference to a target nucleic acid means to reduce or block expression of the target nucleic acid while exhibiting fewer, minimal, or no effects on non-target nucleic acids. Reduction does not necessarily indicate a total elimination of the target nucleic acid's expression.

[0103] “Standard cell assay” means assay(s) described in the Examples and reasonable variations thereof

[0104] “Standard in vivo experiment” means the procedure(s) described in the Example(s) and reasonable variations thereof.

[0105] “Stereorandom chiral center” in the context of a population of molecules of identical molecular formula means a chiral center having a random stereochemical configuration. For example, in a population of molecules comprising a stereorandom chiral center, the number of molecules having the (S) configuration of the stereorandom chiral center may be but is not necessarily the same as the number of molecules having the (R) configuration of the stereorandom chiral center. The stereochemical configuration of a chiral center is considered random when it is the result of a synthetic method that is not designed to control the stereochemical configuration. In certain embodiments, a stereorandom chiral center is a stereorandom phosphorothioate internucleoside linkage.

[0106] “Sugar moiety” means an unmodified sugar moiety or a modified sugar moiety. “Unmodified sugar moiety” or “unmodified sugar” means a 2′-OH(H) furanosyl moiety, as found in RNA (an “unmodified RNA sugar moiety”), or a 2′-H(H) moiety, as found in DNA (an “unmodified DNA sugar moiety”). Unmodified sugar moieties have one hydrogen at each of the 1′, 3′, and 4′ positions, an oxygen at the 3′ position, and two hydrogens at the 5′ position. “Modified sugar moiety” or “modified sugar” means a modified furanosyl sugar moiety or a sugar surrogate. “Modified furanosyl sugar moiety” means a furanosyl sugar comprising a non-hydrogen substituent in place of at least one hydrogen of an unmodified sugar moiety. In certain embodiments, a modified furanosyl sugar moiety is a 2′-substituted sugar moiety. Such modified furanosyl sugar moieties include bicyclic sugars and non-bicyclic sugars.

[0107] “Sugar surrogate” means a modified sugar moiety having other than a furanosyl moiety that can link a nucleobase to another group, such as an internucleoside linkage, conjugate group, or terminal group in an oligonucleotide. Modified nucleosides comprising sugar surrogates can be incorporated into one or more positions within an oligonucleotide and such oligonucleotides are capable of hybridizing to complementary compounds or nucleic acids.

[0108] “Synergy” or “synergize” refers to an effect of a combination that is greater than additive of the effects of each component alone at the same doses.

[0109] “FOXP3” means any nucleic acid or protein of FOXP3. “FOXP3 nucleic acid” means any nucleic acid encoding FOXP3. For example, in certain embodiments, a FOXP3 nucleic acid includes a DNA sequence encoding FOXP3, an RNA sequence transcribed from DNA encoding FOXP3 (including genomic DNA comprising introns and exons), and an mRNA sequence encoding FOXP3. “FOXP3 mRNA” means an mRNA encoding a FOXP3 protein. The target may be referred to in either upper or lower case.

[0110] “FOXP3 specific inhibitor” refers to any agent capable of specifically inhibiting FOXP3 RNA and/or FOXP3 protein expression or activity at the molecular level. For example, FOXP3 specific inhibitors include nucleic acids (including antisense compounds), peptides, antibodies, small molecules, and other agents capable of inhibiting the expression of FOXP3 RNA and/or FOXP3 protein.

[0111] “Target gene” refers to a gene encoding a target.

[0112] “Targeting” means the specific hybridization of a compound to a target nucleic acid in order to induce a desired effect.

[0113] “Target nucleic acid,” “target RNA,” “target RNA transcript” and “nucleic acid target” all mean a nucleic acid capable of being targeted by compounds described herein.

[0114] “Target region” means a portion of a target nucleic acid to which one or more compounds is targeted.

[0115] “Target segment” means the sequence of nucleotides of a target nucleic acid to which a compound is targeted. “5′ target site” refers to the 5′-most nucleotide of a target segment. “3′ target site” refers to the 3′-most nucleotide of a target segment.

[0116] “Terminal group” means a chemical group or group of atoms that is covalently linked to a terminus of an oligonucleotide.

[0117] “Therapeutically effective amount” means an amount of a compound, pharmaceutical agent, or composition that provides a therapeutic benefit to an individual.

[0118] “Treat” refers to administering a compound or pharmaceutical composition to an animal in order to effect an alteration or improvement of a disease, disorder, or condition in the animal.

### Certain Embodiments

[0119] Certain embodiments provide methods, compounds and compositions for inhibiting FOXP3 expression.

[0120] Certain embodiments provide compounds targeted to a FOXP3 nucleic acid. In certain embodiments, the FOXP3 nucleic acid has the sequence set forth in RefSeq or GENBANK Accession No. NM_014009.3 (SEQ ID NO: 1); NT_011568.12_TRUNC_11907130_11921808_COMP (SEQ ID NO: 2); NM_001114377.1 (SEQ ID NO: 3); NC 000023.11_TRUNC_49247001_49273000_COMP (SEQ ID NO: 4); or UCSC Accession No. UC064ZFP.1 corresponding to genomic co-ordinates chrX:49,251,334-49,259,240 on assembly GRCh38/hg38 (SEQ ID NO: 5); each of which is incorporated by reference in its entirety. In certain embodiments, the compound is an antisense compound or oligomeric compound. In certain embodiments, the compound is single-stranded. In certain embodiments, the compound is double-stranded.

[0121] Certain embodiments provide a compound comprising a modified oligonucleotide 8 to 80 linked nucleosides in length and having a nucleobase sequence comprising at least 8 contiguous nucleobases of any of the nucleobase sequences of SEQ ID NOs: 9-3246. In certain embodiments, the compound is an antisense compound or oligomeric compound. In certain embodiments, the compound is single-stranded. In certain embodiments, the compound is double-stranded. In certain embodiments, the modified oligonucleotide is 10 to 30 linked nucleosides in length.

[0122] Certain embodiments provide a compound comprising a modified oligonucleotide 9 to 80 linked nucleosides in length and having a nucleobase sequence comprising at least 9 contiguous nucleobases of any of the nucleobase sequences of SEQ ID NOs: 9-3246. In certain embodiments, the compound is an antisense compound or oligomeric compound. In certain embodiments, the compound is single-stranded. In certain embodiments, the compound is double-stranded. In certain embodiments, the modified oligonucleotide is 10 to 30 linked nucleosides in length.

[0123] Certain embodiments provide a compound comprising a modified oligonucleotide 10 to 80 linked nucleosides in length and having a nucleobase sequence comprising at least 10 contiguous nucleobases of any of the nucleobase sequences of SEQ ID NOs: 9-3246. In certain embodiments, the compound is an antisense compound or oligomeric compound. In certain embodiments, the compound is single-stranded. In certain embodiments, the compound is double-stranded. In certain embodiments, the modified oligonucleotide is 10 to 30 linked nucleosides in length.

[0124] Certain embodiments provide a compound comprising a modified oligonucleotide 11 to 80 linked nucleosides in length and having a nucleobase sequence comprising at least 11 contiguous nucleobases of any of the nucleobase sequences of SEQ ID NOs: 9-3246. In certain embodiments, the compound is an antisense compound or oligomeric compound. In certain embodiments, the compound is single-stranded. In certain embodiments, the compound is double-stranded. In certain embodiments, the modified oligonucleotide is 11 to 30 linked nucleosides in length.

[0125] Certain embodiments provide a compound comprising a modified oligonucleotide 12 to 80 linked nucleosides in length and having a nucleobase sequence comprising at least 12 contiguous nucleobases of any of the nucleobase sequences of SEQ ID NOs: 9-3246. In certain embodiments, the compound is an antisense compound or oligomeric compound. In certain embodiments, the compound is single-stranded. In certain embodiments, the compound is double-stranded. In certain embodiments, the modified oligonucleotide is 12 to 30 linked nucleosides in length.

[0126] Certain embodiments provide a compound comprising a modified oligonucleotide 16 to 80 linked nucleosides in length and having a nucleobase sequence comprising the nucleobase sequence of any one of SEQ ID NOs: 9-3246. In certain embodiments, the compound is an antisense compound or oligomeric compound. In certain embodiments, the compound is single-stranded. In certain embodiments, the compound is double-stranded. In certain embodiments, the modified oligonucleotide is 16 to 30 linked nucleosides in length.

[0127] Certain embodiments provide a compound comprising a modified oligonucleotide consisting of the nucleobase sequence of any one of SEQ ID NOs: 9-3246. In certain embodiments, the compound is an antisense compound or oligomeric compound. In certain embodiments, the compound is single-stranded. In certain embodiments, the compound is double-stranded.

[0128] In certain embodiments, a compound comprises a modified oligonucleotide 8 to 80 linked nucleosides in length and having at least an 8, 9, 10, 11, 12, 13, 14, 15, or 16 contiguous nucleobase portion complementary to an equal length portion within nucleotides 2269-2284 of SEQ ID NO: 1. In certain embodiments, the modified oligonucleotide is 10 to 30 linked nucleosides in length. In certain embodiments, the modified oligonucleotide is 16 to 30 linked nucleosides in length.

[0129] In certain embodiments, a compound comprises a modified oligonucleotide 8 to 80 linked nucleosides in length and having at least an 8, 9, 10, 11, 12, 13, 14, 15, or 16 contiguous nucleobase portion complementary to an equal length portion within nucleotides 1233-1248, 2156-2171, 2735-2750, 4661-4676, 7307-7322, 7331-7346, 7980-7995, 11581-11596, or 12396-12411 of SEQ ID NO: 2. In certain embodiments, the modified oligonucleotide is 10 to 30 linked nucleosides in length. In certain embodiments, the modified oligonucleotide is 16 to 30 linked nucleosides in length.

[0130] In certain embodiments, a compound comprises a modified oligonucleotide 8 to 80 linked nucleosides in length and complementary within nucleotides 2269-2284 of SEQ ID NO: 1. In certain embodiments, the modified oligonucleotide is 10 to 30 linked nucleosides in length. In certain embodiments, the modified oligonucleotide is 16 to 30 linked nucleosides in length.

[0131] In certain embodiments, a compound comprises a modified oligonucleotide 8 to 80 linked nucleosides in length and complementary within nucleotides 1233-1248, 2156-2171, 2735-2750, 4661-4676, 7307-7322, 7331-7346, 7980-7995, 11581-11596, or 12396-12411 of SEQ ID NO: 2. In certain embodiments, the modified oligonucleotide is 10 to 30 linked nucleosides in length. In certain embodiments, the modified oligonucleotide is 16 to 30 linked nucleosides in length.

[0132] In certain embodiments, a compound comprises a modified oligonucleotide 8 to 80 linked nucleosides in length and having a nucleobase sequence comprising at least an 8, 9, 10, 11, 12, 13, 14, 15, or 16 contiguous nucleobase portion any one of SEQ ID NOs: 449, 501, 544, 794, 1293, 1307, 1511, 1755, 2492, or 2575. In certain embodiments, the modified oligonucleotide is 10 to 30 linked nucleosides in length. In certain embodiments, the modified oligonucleotide is 16 to 30 linked nucleosides in length.

[0133] In certain embodiments, a compound comprises a modified oligonucleotide 16 to 80 linked nucleosides in length and having a nucleobase sequence comprising any one of SEQ ID NOs: 449, 501, 544, 794, 1293, 1307, 1511, 1755, 2492, or 2575. In certain embodiments, the modified oligonucleotide is 16 to 30 linked nucleosides in length.

[0134] In certain embodiments, a compound comprises a modified oligonucleotide 16 linked nucleosides in length having a nucleobase sequence consisting of any one of SEQ ID NOs: 449, 501, 544, 794, 1293, 1307, 1511, 1755, 2492, or 2575.

[0135] In certain embodiments, a compound targeted to FOXP3 is ION 1063734. Out of over 3,000 compounds that were screened as described in the Examples section below, ION 1062428, 1062641, 1062835, 1062937, 1063268, 1063649, 1063655, 1063734, 1064096, or 1064313 emerged as the top lead compounds.

[0136] In certain embodiments, any of the foregoing modified oligonucleotides comprises at least one modified internucleoside linkage, at least one modified sugar, and/or at least one modified nucleobase.

[0137] In certain embodiments, any of the foregoing modified oligonucleotides comprises at least one modified sugar. In certain embodiments, at least one modified sugar comprises a 2′-O-methoxyethyl group. In certain embodiments, at least one modified sugar is a bicyclic sugar, such as a 4′-CH(CH₃)—O-2′ group, a 4′-CH₂—O-2′ group, or a 4′-(CH₂)₂—O-2′-group.

[0138] In certain embodiments, the modified oligonucleotide comprises at least one modified internucleoside linkage, such as a phosphorothioate internucleoside linkage.

[0139] In certain embodiments, any of the foregoing modified oligonucleotides comprises at least one modified nucleobase, such as 5-methylcytosine.

[0140] In certain embodiments, any of the foregoing modified oligonucleotides comprises:
[0141] a gap segment consisting of linked deoxynucleosides;
[0142] a 5′ wing segment consisting of linked nucleosides; and
[0143] a 3′ wing segment consisting of linked nucleosides;

[0144] wherein the gap segment is positioned between the 5′ wing segment and the 3′ wing segment and wherein each nucleoside of each wing segment comprises a modified sugar. In certain embodiments, the modified oligonucleotide is 16 to 80 linked nucleosides in length having a nucleobase sequence comprising the sequence recited in any one of SEQ ID NOs: 449, 501, 544, 794, 1293, 1307, 1511, 1755, 2492, or 2575. In certain embodiments, the modified oligonucleotide is 16 to 30 linked nucleosides in length having a nucleobase sequence comprising the sequence recited in any one of SEQ ID NOs: 449, 501, 544, 794, 1293, 1307, 1511, 1755, 2492, or 2575. In certain embodiments, the modified oligonucleotide is 16 linked nucleosides in length having a nucleobase sequence consisting of the sequence recited in any one of SEQ ID NOs: 449, 501, 544, 794, 1293, 1307, 1511, 1755, 2492, or 2575.

[0145] In certain embodiments, a compound comprises or consists of a modified oligonucleotide 16-80 linked nucleobases in length having a nucleobase sequence comprising the sequence recited in any one of SEQ ID NOs: 9-3246, wherein the modified oligonucleotide comprises:
[0146] a gap segment consisting of linked deoxynucleosides;
[0147] a 5′ wing segment consisting of linked nucleosides; and
[0148] a 3′ wing segment consisting of linked nucleosides;

[0149] wherein the gap segment is positioned between the 5′ wing segment and the 3′ wing segment and wherein each nucleoside of each wing segment comprises a modified sugar. In certain embodiments, the modified oligonucleotide is 16-30 linked nucleosides in length. In certain embodiments, the modified oligonucleotide is 16 linked nucleosides in length.

[0150] In certain embodiments, a compound comprises or consists of a modified oligonucleotide 16-80 linked nucleobases in length having a nucleobase sequence comprising the sequence recited in any one of SEQ ID NOs: 449, 501, 544, 794, 1293, 1307, 1511, 1755, 2492, or 2575, wherein the modified oligonucleotide comprises:
[0151] a gap segment consisting of linked deoxynucleosides;
[0152] a 5′ wing segment consisting of linked nucleosides; and
[0153] a 3′ wing segment consisting of linked nucleosides;

[0154] wherein the gap segment is positioned between the 5′ wing segment and the 3′ wing segment and wherein each nucleoside of each wing segment comprises a modified sugar. In certain embodiments, the modified oligonucleotide is 16-30 linked nucleosides in length. In certain embodiments, the modified oligonucleotide is 16 linked nucleosides in length.

[0155] In certain embodiments, a compound comprises or consists of a modified oligonucleotide 16-80 linked nucleobases in length having a nucleobase sequence comprising the sequence recited in any one of SEQ ID NOs: 449, 501, 544, 794, 1293, 1307, 1511, 1755, 2492, or 2575, wherein the modified oligonucleotide comprises:

[0156] a gap segment consisting of ten linked deoxynucleosides;

[0157] a 5′ wing segment consisting of three linked nucleosides; and

[0158] a 3′ wing segment consisting of three linked nucleosides;

[0159] wherein the gap segment is positioned between the 5′ wing segment and the 3′ wing segment; wherein each nucleoside of each wing segment comprises a cEt nucleoside; wherein each internucleoside linkage is a phosphorothioate linkage; and wherein each cytosine is a 5-methylcytosine. In certain embodiments, the modified oligonucleotide is 16-30 linked nucleosides in length. In certain embodiments, the modified oligonucleotide is 16 linked nucleosides in length.

[0160] In certain embodiments, a compound comprises or consists of a modified oligonucleotide 16-80 linked nucleobases in length having a nucleobase sequence comprising the sequence recited in SEQ ID NO: 449, wherein the modified oligonucleotide comprises:

[0161] a gap segment consisting of ten linked deoxynucleosides;

[0162] a 5′ wing segment consisting of three linked nucleosides; and

[0163] a 3′ wing segment consisting of three linked nucleosides;

[0164] wherein the gap segment is positioned between the 5′ wing segment and the 3′ wing segment; wherein each nucleoside of each wing segment comprises a cEt nucleoside; wherein each internucleoside linkage is a phosphorothioate linkage; and wherein each cytosine is a 5-methylcytosine. In certain embodiments, the modified oligonucleotide is 16-30 linked nucleosides in length. In certain embodiments, the modified oligonucleotide is 16 linked nucleosides in length.

[0165] In certain embodiments, a compound comprises or consists of ION 1063734 or salt thereof, having the following chemical structure:

[chemical structure]

[0166] In certain embodiments, a compound comprises or consists of the sodium salt of ION 1063734, having the following chemical structure:

[chemical structure]

[0167] In any of the foregoing embodiments, the compound or oligonucleotide can be at least 85%, at least 90%, at least 95%, at least 98%, at least 99%, or 100% complementary to a nucleic acid encoding FOXP3.

[0168] In any of the foregoing embodiments, the compound can be single-stranded. In certain embodiments, the compound comprises deoxyribonucleotides. In certain embodiments, the compound is double-stranded. In certain embodiments, the compound is double-stranded and comprises ribonucleotides. In any of the foregoing embodiments, the compound can be an antisense compound or oligomeric compound.

[0169] In any of the foregoing embodiments, the compound can be 8 to 80, 10 to 30, 12 to 50, 13 to 30, 13 to 50, 14 to 30, 14 to 50, 15 to 30, 15 to 50, 16 to 30, 16 to 50, 17 to 30, 17 to 50, 18 to 22, 18 to 24, 18 to 30, 18 to 50, 19 to 22, 19 to 30, 19 to 50, or 20 to 30 linked nucleosides in length. In certain embodiments, the compound comprises or consists of an oligonucleotide.

[0170] In certain embodiments, compounds or compositions provided herein comprise a salt of the modified oligonucleotide. In certain embodiments, the salt is a sodium salt. In certain embodiments, the salt is a potassium salt.

[0171] In certain embodiments, the compounds or compositions as described herein are highly tolerable as demonstrated by having at least one of an increase an alanine transaminase (ALT) or aspartate transaminase (AST) value of no more than 4 fold, 3 fold, or 2 fold over saline treated animals or an increase in liver, spleen, or kidney weight of no more than 30%, 20%, 15%, 12%, 10%, 5%, or 2% compared to control treated animals. In certain embodiments, the compounds or compositions as described herein are highly tolerable as demonstrated by having no increase of ALT or AST over control treated animals. In certain embodiments, the compounds or compositions as described herein are highly tolerable as demonstrated by having no increase in liver, spleen, or kidney weight over control animals.

[0172] Certain embodiments provide a composition comprising the compound of any of the aforementioned embodiments or salt thereof and at least one of a pharmaceutically acceptable carrier or diluent. In certain embodiments, the composition has a viscosity less than about 40 centipoise (cP), less than about 30 centipose (cP), less than about 20 centipose (cP), less than about 15 centipose (cP), or less than about 10 centipose (cP). In certain embodiments, the composition having any of the aforementioned viscosities comprises a compound provided herein at a concentration of about 100 mg/mL, about 125 mg/mL, about 150 mg/mL, about 175 mg/mL, about 200 mg/mL, about 225 mg/mL, about 250 mg/mL, about 275 mg/mL, or about 300 mg/mL. In certain embodiments, the composition having any of the aforementioned viscosities and/or compound concentrations has a temperature of room temperature or about 20° C., about 21° C., about 22° C., about 23° C., about 24° C., about 25° C., about 26° C., about 27° C., about 28° C., about 29° C., or about 30° C.

### Certain Indications

[0173] Certain embodiments provided herein relate to methods of inhibiting FOXP3 expression, which can be useful for treating, preventing, or ameliorating cancer in an individual, by administration of a compound that targets FOXP3. In certain embodiments, the compound can be a FOXP3 specific inhibitor. In certain embodiments, the compound can be an antisense compound, oligomeric compound, or oligonucleotide targeted to FOXP3.

[0174] Examples of cancers treatable, preventable, and/or ameliorable with the compounds and methods provided herein include cancers with FOXP3 positive (FOXP3+) Tregs in the microenvironment or stroma or tumor draining lymph nodes, lung cancer, non-small cell lung carcinoma (NSCLC), small-cell lung carcinoma (SCLC), squamous cell carcinoma (SCC), head and neck cancer, head and neck squamous cell carcinoma (HNSCC), gastrointestinal cancer, large intestinal cancer, small intestinal cancer, stomach cancer, colon cancer, colorectal cancer, bladder cancer, liver cancer, hepatocellular carcinoma (HCC), esophageal cancer, pancreatic cancer, biliary tract cancer, gastric cancer, urothelial cancer, breast cancer, triple-negative breast cancer (TNBC), ovarian cancer, endometrial cancer, cervical cancer, prostate cancer, mesothelioma, sarcomas (e.g. epitheloid, rhabdoid and synovial), chordoma, renal cancer, renal cell carcinoma (RCC), brain cancer, neuroblastoma, glioblastoma, skin cancer, melanoma, basal cell carcinoma, merkel cell carcinoma, blood cancer, hematopoetic cancer, myeloma, multiple myeloma (MM), B cell malignancies, lymphoma, B cell lymphoma, Hodgkin lymphoma, T cell lymphoma, leukemia, or acute lymphocytic leukemia (ALL).

[0175] In certain embodiments, the B-cell lymphoma is a non-Hodgkin's B-cell lymphoma. Examples of non-Hodgkin's B-cell lymphoma of certain embodiments that can be treated with compounds provided herein include, but are not limited to, diffuse large B cell lymphoma (DLBCL), activated B-cell lymphoma (ABC-DLBCL), germinal center B-cell lymphoma (GCB DLBCL), follicular lymphoma, mucosa-associated lymphatic tissue lymphoma (MALT), small cell lymphocytic lymphoma, chronic lymphocytic leukemia, mantle cell lymphoma (MCL), Burkitt lymphoma, mediastinal large B cell lymphoma, Waldenström macroglobulinemia, nodal marginal zone B cell lymphoma (NMZL), splenic marginal zone lymphoma (SMZL), intravascular large B-cell lymphoma, primary effusion lymphoma, and lymphomatoid granulomatosis.

[0176] In certain embodiments, the T-cell lymphoma that can be treated with compounds provided herein include, but are not limited to, peripheral T-cell lymphoma, and anaplastic large cell lymphoma (ALCL).

[0177] In certain embodiments, the leukemia that can be treated with compounds provided herein includes, but is not limited to, acute lymphocytic leukemia (ALL).

[0178] In certain embodiments, the breast cancer has one or more of the following characteristics: Androgen Receptor positive, dependent on androgen for growth; Estrogen Receptor (ER) negative, independent of estrogen for growth; Progesterone Receptor (PR) negative, independent of progesterone for growth; or Her2/neu negative. In certain embodiments, the breast cancer is ER, PR, and HER2 triple negative (ER−, PR−, HER2−). In certain embodiments, the breast cancer is triple negative and AR positive (ER−, PR−, HER2−, AR+). In certain embodiments, the breast cancer is ER negative and AR positive (ER−, AR+). In certain embodiments, the breast cancer is ER positive and AR positive (ER+, AR+). In certain embodiments, the breast cancer is apocrine. Apocrine breast cancers are often “triple negative”, meaning that the cells do not express ER, PR, or HER2 receptors, and usually, but not necessarily, AR positive. In certain embodiments, an apocrine breast cancer is ER, PR, and HER2 triple negative and AR positive (ER−, PR−, HER2−, AR+). In certain embodiments, an apocrine breast cancer is ER negative and AR positive (ER−, AR+). In certain embodiments, an apocrine breast cancer originates from the sweat gland of the breast. In certain embodiments, an apocrine breast cancer is a ductal cancer or cancer cell of the breast. In certain embodiments, an apocrine breast cancer can have any one or more of the following features: a large amount of eosinophilic granular cytoplasm, well-defined margins, large vesicular nuclei, a nuclear to cytoplasmic ratio of about 1:2, and/or accumulations of secreted granules in the apical cytoplasm known as apical snouts. In certain embodiments, the breast cancer is an ER negative and AR positive (ER−, AR+) molecular apocrine breast cancer. In certain aspects, an ER negative and AR positive (ER−, AR+) molecular apocrine breast cancer can further be PR positive, PR negative, HER2 negative, or HER2 positive. In certain embodiments, the breast cancer is HER2 positive. In certain embodiments, the breast cancer is PR positive. In certain embodiments, the breast cancer is ER positive. Breast cancer can be identified as positive or negative with respect to hormone receptors, such as ER, PR, or HER2 by standard histological techniques. For example, in some embodiments histological breast cancer samples can be classified as “triple negative” (ER−, PR−, HER2−) when less than 1% of cells demonstrate nuclear staining for estrogen and progesterone receptors, and immunohistochemical staining for HER2 shows a 0, 1-fold, or a 2-fold positive score and a FISH ratio (HER2 gene signals to chromosome 17 signals) of less than 1.8 according to the relevant ASCO and CAP guidelines. (Meyer, P. et al., PLoS ONE 7(5): e38361 (2012)).

[0179] In certain embodiments, a method of treating, preventing, or ameliorating cancer in an individual comprises administering to the individual a compound comprising a FOXP3 specific inhibitor, thereby treating, preventing, or ameliorating the cancer. In certain embodiments, the compound comprises an antisense compound targeted to FOXP3. In certain embodiments, the compound comprises an oligonucleotide targeted to FOXP3. In certain embodiments, a compound comprises a modified oligonucleotide 8 to 80 linked nucleosides in length and having a nucleobase sequence comprising at least 8 contiguous nucleobases of any of the nucleobase sequences of SEQ ID NOs: 9-3246. In certain embodiments, a compound comprises a modified oligonucleotide 16 to 80 linked nucleosides in length and having a nucleobase sequence comprising the nucleobase sequence of any one of SEQ ID NOs: 9-3246. In certain embodiments, a compound comprises a modified oligonucleotide consisting of the nucleobase sequence of any one of SEQ ID NOs: 9-3246. In certain embodiments, a compound comprises a modified oligonucleotide 16 to 80 linked nucleosides in length having a nucleobase sequence comprising any one of SEQ ID NOs: 449, 501, 544, 794, 1293, 1307, 1511, 1755, 2492, or 2575. In certain embodiments, a compound comprises a modified oligonucleotide having a nucleobase sequence consisting of any one of SEQ ID NOs: 449, 501, 544, 794, 1293, 1307, 1511, 1755, 2492, or 2575. In any of the foregoing embodiments, the modified oligonucleotide can be 10 to 30 linked nucleosides in length. In certain embodiments, the compound is ION 1062428, 1062641, 1062835, 1062937, 1063268, 1063649, 1063655, 1063734, 1064096, or 1064313. In any of the foregoing embodiments, the compound can be single-stranded or double-stranded. In any of the foregoing embodiments, the compound can be an antisense compound or oligomeric compound. In certain embodiments, the compound is administered to the individual parenterally. In certain embodiments, administering the compound inhibits or reduces immunosuppression, Treg immunosuppressive activity, cancer cell proliferation, tumor growth, or metastasis. In certain embodiments, administering the compound induces or activates anticancer or antitumor immunity; anticancer or antitumor immune response; immune cell activation or infiltration; inflammatory cell activation or infiltration; effector immune cell activation or infiltration; T cell activation or infiltration; CD8 T cell activation or infiltration; NK cell activation or infiltration; macrophage and dendritic cell activation or infiltration; inflammation; or inflammatory cytokine or chemokine expression.

[0180] In certain embodiments, a method of inhibiting expression of FOXP3 in an individual having, or at risk of having, cancer comprises administering to the individual a compound comprising a FOXP3 specific inhibitor, thereby inhibiting expression of FOXP3 in the individual. In certain embodiments, administering the compound inhibits expression of FOXP3 in the Treg cells, tumor microenvironment, tumor stroma, Treg infiltrated tumors, immune cells, lymphoid tissue, lymph nodes, or intra-tumoral Foxp3+ cells. In certain embodiments, the individual has, or is at risk of having a cancer having FOXP3 positive (FOXP3+) Tregs in the microenvironment or stroma or tumor draining lymph nodes, lung cancer, non-small cell lung carcinoma (NSCLC), small-cell lung carcinoma (SCLC), squamous cell carcinoma (SCC), head and neck cancer, head and neck squamous cell carcinoma (HNSCC), gastrointestinal cancer, large intestinal cancer, small intestinal cancer, stomach cancer, colon cancer, colorectal cancer, bladder cancer, liver cancer, hepatocellular carcinoma (HCC), esophageal cancer, pancreatic cancer, biliary tract cancer, gastric cancer, urothelial cancer, breast cancer, triple-negative breast cancer (TNBC), ovarian cancer, endometrial cancer, cervical cancer, prostate cancer, mesothelioma, sarcomas (e.g. epitheloid, rhabdoid and synovial), chordoma, renal cancer, renal cell carcinoma (RCC), brain cancer, neuroblastoma, glioblastoma, skin cancer, melanoma, basal cell carcinoma, merkel cell carcinoma, blood cancer, hematopoetic cancer, myeloma, multiple myeloma (MM), B cell malignancies, lymphoma, B cell lymphoma, Hodgkin lymphoma, T cell lymphoma, leukemia, or acute lymphocytic leukemia (ALL). In certain embodiments, the compound comprises an antisense compound targeted to FOXP3. In certain embodiments, the compound comprises an oligonucleotide targeted to FOXP3. In certain embodiments, the compound comprises a modified oligonucleotide 8 to 80 linked nucleosides in length and having a nucleobase sequence comprising at least 8 contiguous nucleobases of any of the nucleobase sequences of SEQ ID NOs: 9-3246. In certain embodiments, the compound comprises a modified oligonucleotide 16 to 80 linked nucleosides in length and having a nucleobase sequence comprising the nucleobase sequence of any one of SEQ ID NOs: 9-3246. In certain embodiments, the compound comprises a modified oligonucleotide consisting of the nucleobase sequence of any one of SEQ ID NOs: 9-3246. In certain embodiments, the compound comprises a modified oligonucleotide of 16 to 80 linked nucleosides in length having a nucleobase sequence comprising any one of SEQ ID NOs: 449, 501, 544, 794, 1293, 1307, 1511, 1755, 2492, or 2575. In certain embodiments, the compound comprises a modified oligonucleotide having a nucleobase sequence consisting of any one of SEQ ID NOs: 449, 501, 544, 794, 1293, 1307, 1511, 1755, 2492, or 2575. In any of the foregoing embodiments, the modified oligonucleotide can be 10 to 30 linked nucleosides in length. In certain embodiments, the compound is ION 1062428, 1062641, 1062835, 1062937, 1063268, 1063649, 1063655, 1063734, 1064096, or 1064313. In any of the foregoing embodiments, the compound can be single-stranded or double-stranded. In any of the foregoing embodiments, the compound can be an antisense compound or oligomeric compound. In certain embodiments, the compound is administered to the individual parenterally. In certain embodiments, administering the compound inhibits or reduces immunosuppression, Treg immunosuppressive activity, cancer cell proliferation, tumor growth, or metastasis. In certain embodiments, administering the compound induces or activates anticancer or antitumor immunity; anticancer or antitumor immune response; immune cell activation or infiltration; inflammatory cell activation or infiltration; effector immune cell activation or infiltration; T cell activation or infiltration; CD8 T cell activation or infiltration; NK cell activation or infiltration; macrophage and dendritic cell activation or infiltration; inflammation; or inflammatory cytokine or chemokine expression. In certain embodiments, the individual is identified as having or at risk of having cancer.

[0181] In certain embodiments, a method of inhibiting expression of FOXP3 in a cell comprises contacting the cell with a compound comprising a FOXP3 specific inhibitor, thereby inhibiting expression of FOXP3 in the cell. In certain embodiments, the cell is a cancer cell. In certain embodiments, the cell is a Treg cell, tumor microenvironment cell, tumor stroma cell, Treg cell infiltrated in a tumor, immune cell, lymphoid cell, lymph node cell, or intra-tumoral Foxp3+ cell. In certain embodiments, the cell is in the tumor microenvironment, tumor stroma, or lymph node of an individual who has, or is at risk of having cancer. In certain embodiments, the cancer is a cancer that has FOXP3 positive (FOXP3+) Tregs in the microenvironment or stroma or tumor draining lymph nodes, lung cancer, non-small cell lung carcinoma (NSCLC), small-cell lung carcinoma (SCLC), squamous cell carcinoma (SCC), head and neck cancer, head and neck squamous cell carcinoma (HNSCC), gastrointestinal cancer, large intestinal cancer, small intestinal cancer, stomach cancer, colon cancer, colorectal cancer, bladder cancer, liver cancer, hepatocellular carcinoma (HCC), esophageal cancer, pancreatic cancer, biliary tract cancer, gastric cancer, urothelial cancer, breast cancer, triple-negative breast cancer (TNBC), ovarian cancer, endometrial cancer, cervical cancer, prostate cancer, mesothelioma, sarcomas (e.g. epitheloid, rhabdoid and synovial), chordoma, renal cancer, renal cell carcinoma (RCC), brain cancer, neuroblastoma, glioblastoma, skin cancer, melanoma, basal cell carcinoma, merkel cell carcinoma, blood cancer, hematopoetic cancer, myeloma, multiple myeloma (MM), B cell malignancies, lymphoma, B cell lymphoma, Hodgkin lymphoma, T cell lymphoma, leukemia, or acute lymphocytic leukemia (ALL). In certain embodiments, the compound comprises an antisense compound targeted to FOXP3. In certain embodiments, the compound comprises an oligonucleotide targeted to FOXP3. In certain embodiments, the compound comprises a modified oligonucleotide 8 to 80 linked nucleosides in length and having a nucleobase sequence comprising at least 8 contiguous nucleobases of any of the nucleobase sequences of SEQ ID NOs: 9-3246. In certain embodiments, the compound comprises a modified oligonucleotide 16 to 80 linked nucleosides in length and having a nucleobase sequence comprising the nucleobase sequence of any one of SEQ ID NOs: 9-3246. In certain embodiments, the compound comprises a modified oligonucleotide consisting of the nucleobase sequence of any one of SEQ ID NOs: 9-3246. In certain embodiments, the compound comprises a modified oligonucleotide of 16 to 80 linked nucleosides in length having a nucleobase sequence comprising any one of SEQ ID NOs: 449, 501, 544, 794, 1293, 1307, 1511, 1755, 2492, or 2575. In certain embodiments, the compound comprises a modified oligonucleotide having a nucleobase sequence consisting of any one of SEQ ID NOs: 449, 501, 544, 794, 1293, 1307, 1511, 1755, 2492, or 2575. In any of the foregoing embodiments, the modified oligonucleotide can be 10 to 30 linked nucleosides in length. In certain embodiments, the compound is ION 1062428, 1062641, 1062835, 1062937, 1063268, 1063649, 1063655, 1063734, 1064096, or 1064313. In any of the foregoing embodiments, the compound can be single-stranded or double-stranded. In any of the foregoing embodiments, the compound can be an antisense compound or oligomeric compound.

[0182] In certain embodiments, a method of reducing or inhibiting immunosuppression, Treg immunosuppressive activity, cancer cell proliferation, tumor growth, or metastasis of an individual having, or at risk of having, cancer comprises administering to the individual a compound comprising a FOXP3 specific inhibitor, thereby reducing or inhibiting immunosuppression, Treg immunosuppressive activity, cancer cell proliferation, tumor growth, or metastasis in the individual. In certain embodiments, a method of inducing or activating anticancer or antitumor immunity; anticancer or antitumor immune response; immune cell activation or infiltration; inflammatory cell activation or infiltration; effector immune cell activation or infiltration; T cell activation or infiltration; CD8 T cell activation or infiltration; NK cell activation or infiltration; macrophage and dendritic cell activation or infiltration; inflammation; or inflammatory cytokine or chemokine expression in an individual having, or at risk of having, cancer comprises administering to the individual a compound comprising a FOXP3 specific inhibitor. In certain embodiments, the individual has, or is at risk of having, a cancer having FOXP3 positive (FOXP3+) Tregs in the microenvironment or stroma or tumor draining lymph nodes, lung cancer, non-small cell lung carcinoma (NSCLC), small-cell lung carcinoma (SCLC), squamous cell carcinoma (SCC), head and neck cancer, head and neck squamous cell carcinoma (HNSCC), gastrointestinal cancer, large intestinal cancer, small intestinal cancer, stomach cancer, colon cancer, colorectal cancer, bladder cancer, liver cancer, hepatocellular carcinoma (HCC), esophageal cancer, pancreatic cancer, biliary tract cancer, gastric cancer, urothelial cancer, breast cancer, triple-negative breast cancer (TNBC), ovarian cancer, endometrial cancer, cervical cancer, prostate cancer, mesothelioma, sarcomas (e.g. epitheloid, rhabdoid and synovial), chordoma, renal cancer, renal cell carcinoma (RCC), brain cancer, neuroblastoma, glioblastoma, skin cancer, melanoma, basal cell carcinoma, merkel cell carcinoma, blood cancer, hematopoetic cancer, myeloma, multiple myeloma (MM), B cell malignancies, lymphoma, B cell lymphoma, Hodgkin lymphoma, T cell lymphoma, leukemia, or acute lymphocytic leukemia (ALL). In certain embodiments, the compound comprises an antisense compound targeted to FOXP3. In certain embodiments, the compound comprises an oligonucleotide targeted to FOXP3. In certain embodiments, the compound comprises a modified oligonucleotide 8 to 80 linked nucleosides in length and having a nucleobase sequence comprising at least 8 contiguous nucleobases of any of the nucleobase sequences of SEQ ID NOs: 9-3246. In certain embodiments, the compound comprises a modified oligonucleotide 16 to 80 linked nucleosides in length and having a nucleobase sequence comprising the nucleobase sequence of any one of SEQ ID NOs: 9-3246. In certain embodiments, the compound comprises a modified oligonucleotide consisting of the nucleobase sequence of any one of SEQ ID NOs: 9-3246. In certain embodiments, the compound comprises a modified oligonucleotide of 16 to 80 linked nucleosides in length having a nucleobase sequence comprising any one of SEQ ID NOs: 449, 501, 544, 794, 1293, 1307, 1511, 1755, 2492, or 2575. In certain embodiments, the compound comprises a modified oligonucleotide having a nucleobase sequence consisting of any one of SEQ ID NOs: 449, 501, 544, 794, 1293, 1307, 1511, 1755, 2492, or 2575. In any of the foregoing embodiments, the modified oligonucleotide can be 10 to 30 linked nucleosides in length. In certain embodiments, the compound is ION 1062428, 1062641, 1062835, 1062937, 1063268, 1063649, 1063655, 1063734, 1064096, or 1064313. In any of the foregoing embodiments, the compound can be single-stranded or double-stranded. In any of the foregoing embodiments, the compound can be an antisense compound or oligomeric compound. In certain embodiments, the compound is administered to the individual parenterally. In certain embodiments, the individual is identified as having or at risk of having cancer.

[0183] Certain embodiments are drawn to a compound comprising a FOXP3 specific inhibitor for use in treating cancer. In certain embodiments, the cancer is a cancer having FOXP3 positive (FOXP3+) Tregs in the microenvironment or stroma or tumor draining lymph nodes, lung cancer, non-small cell lung carcinoma (NSCLC), small-cell lung carcinoma (SCLC), squamous cell carcinoma (SCC), head and neck cancer, head and neck squamous cell carcinoma (HNSCC), gastrointestinal cancer, large intestinal cancer, small intestinal cancer, stomach cancer, colon cancer, colorectal cancer, bladder cancer, liver cancer, hepatocellular carcinoma (HCC), esophageal cancer, pancreatic cancer, biliary tract cancer, gastric cancer, urothelial cancer, breast cancer, triple-negative breast cancer (TNBC), ovarian cancer, endometrial cancer, cervical cancer, prostate cancer, mesothelioma, sarcomas (e.g. epitheloid, rhabdoid and synovial), chordoma, renal cancer, renal cell carcinoma (RCC), brain cancer, neuroblastoma, glioblastoma, skin cancer, melanoma, basal cell carcinoma, merkel cell carcinoma, blood cancer, hematopoetic cancer, myeloma, multiple myeloma (MM), B cell malignancies, lymphoma, B cell lymphoma, Hodgkin lymphoma, T cell lymphoma, leukemia, or acute lymphocytic leukemia (ALL). In certain embodiments, the compound comprises an antisense compound targeted to FOXP3. In certain embodiments, the compound comprises an oligonucleotide targeted to FOXP3. In certain embodiments, the compound comprises a modified oligonucleotide 8 to 80 linked nucleosides in length and having a nucleobase sequence comprising at least 8 contiguous nucleobases of any of the nucleobase sequences of SEQ ID NOs: 9-3246. In certain embodiments, the compound comprises a modified oligonucleotide 16 to 80 linked nucleosides in length and having a nucleobase sequence comprising the nucleobase sequence of any one of SEQ ID NOs: 9-3246. In certain embodiments, the compound comprises a modified oligonucleotide consisting of the nucleobase sequence of any one of SEQ ID NOs: 9-3246. In certain embodiments, the compound comprises a modified oligonucleotide of 16 to 80 linked nucleosides in length having a nucleobase sequence comprising any one of SEQ ID NOs: 449, 501, 544, 794, 1293, 1307, 1511, 1755, 2492, or 2575. In certain embodiments, the compound comprises a modified oligonucleotide having a nucleobase sequence consisting of any one of SEQ ID NOs: 449, 501, 544, 794, 1293, 1307, 1511, 1755, 2492, or 2575. In any of the foregoing embodiments, the modified oligonucleotide can be 10 to 30 linked nucleosides in length. In certain embodiments, the compound is ION 1062428, 1062641, 1062835, 1062937, 1063268, 1063649, 1063655, 1063734, 1064096, or 1064313. In any of the foregoing embodiments, the compound can be single-stranded or double-stranded. In any of the foregoing embodiments, the compound can be an antisense compound or oligomeric compound.

[0184] Certain embodiments are drawn to a compound comprising a FOXP3 specific inhibitor for use in reducing or inhibiting immunosuppression, Treg immunosuppressive activity, cancer cell proliferation, tumor growth, or metastasis in an individual having cancer. Certain embodiments are drawn to a compound comprising a FOXP3 specific inhibitor for use in inducing or activating anticancer or antitumor immunity; anticancer or antitumor immune response; immune cell activation or infiltration; inflammatory cell activation or infiltration; effector immune cell activation or infiltration; T cell activation or infiltration; CD8 T cell activation or infiltration; NK cell activation or infiltration; macrophage and dendritic cell activation or infiltration; inflammation; or inflammatory cytokine or chemokine expression in an individual having cancer. In certain embodiments, the cancer is a cancer having FOXP3 positive (FOXP3+) Tregs in the microenvironment or stroma or tumor draining lymph nodes, lung cancer, non-small cell lung carcinoma (NSCLC), small-cell lung carcinoma (SCLC), squamous cell carcinoma (SCC), head and neck cancer, head and neck squamous cell carcinoma (HNSCC), gastrointestinal cancer, large intestinal cancer, small intestinal cancer, stomach cancer, colon cancer, colorectal cancer, bladder cancer, liver cancer, hepatocellular carcinoma (HCC), esophageal cancer, pancreatic cancer, biliary tract cancer, gastric cancer, urothelial cancer, breast cancer, triple-negative breast cancer (TNBC), ovarian cancer, endometrial cancer, cervical cancer, prostate cancer, mesothelioma, sarcomas (e.g. epitheloid, rhabdoid and synovial), chordoma, renal cancer, renal cell carcinoma (RCC), brain cancer, neuroblastoma, glioblastoma, skin cancer, melanoma, basal cell carcinoma, merkel cell carcinoma, blood cancer, hematopoetic cancer, myeloma, multiple myeloma (MM), B cell malignancies, lymphoma, B cell lymphoma, Hodgkin lymphoma, T cell lymphoma, leukemia, or acute lymphocytic leukemia (ALL). In certain embodiments, the compound comprises an antisense compound targeted to FOXP3. In certain embodiments, the compound comprises an oligonucleotide targeted to FOXP3. In certain embodiments, the compound comprises a modified oligonucleotide 8 to 80 linked nucleosides in length and having a nucleobase sequence comprising at least 8 contiguous nucleobases of any of the nucleobase sequences of SEQ ID NOs: 9-3246. In certain embodiments, the compound comprises a modified oligonucleotide 16 to 80 linked nucleosides in length and having a nucleobase sequence comprising the nucleobase sequence of any one of SEQ ID NOs: 9-3246. In certain embodiments, the compound comprises a modified oligonucleotide consisting of the nucleobase sequence of any one of SEQ ID NOs: 9-3246. In certain embodiments, the compound comprises a modified oligonucleotide of 16 to 80 linked nucleosides in length having a nucleobase sequence comprising any one of SEQ ID NOs: 449, 501, 544, 794, 1293, 1307, 1511, 1755, 2492, or 2575. In certain embodiments, the compound comprises a modified oligonucleotide having a nucleobase sequence consisting of any one of SEQ ID NOs: 449, 501, 544, 794, 1293, 1307, 1511, 1755, 2492, or 2575. In any of the foregoing embodiments, the modified oligonucleotide can be 10 to 30 linked nucleosides in length. In certain embodiments, the compound is ION 1062428, 1062641, 1062835, 1062937, 1063268, 1063649, 1063655, 1063734, 1064096, or 1064313. In any of the foregoing embodiments, the compound can be single-stranded or double-stranded. In any of the foregoing embodiments, the compound can be an antisense compound or oligomeric compound.

[0185] Certain embodiments are drawn to use of a compound comprising a FOXP3 specific inhibitor for the manufacture or preparation of a medicament for treating cancer. Certain embodiments are drawn to use of a compound comprising a FOXP3 specific inhibitor for the preparation of a medicament for treating cancer. In certain embodiments, the cancer is a cancer having FOXP3 positive (FOXP3+) Tregs in the microenvironment or stroma or tumor draining lymph nodes, lung cancer, non-small cell lung carcinoma (NSCLC), small-cell lung carcinoma (SCLC), squamous cell carcinoma (SCC), head and neck cancer, head and neck squamous cell carcinoma (HNSCC), gastrointestinal cancer, large intestinal cancer, small intestinal cancer, stomach cancer, colon cancer, colorectal cancer, bladder cancer, liver cancer, hepatocellular carcinoma (HCC), esophageal cancer, pancreatic cancer, biliary tract cancer, gastric cancer, urothelial cancer, breast cancer, triple-negative breast cancer (TNBC), ovarian cancer, endometrial cancer, cervical cancer, prostate cancer, mesothelioma, sarcomas (e.g. epitheloid, rhabdoid and synovial), chordoma, renal cancer, renal cell carcinoma (RCC), brain cancer, neuroblastoma, glioblastoma, skin cancer, melanoma, basal cell carcinoma, merkel cell carcinoma, blood cancer, hematopoetic cancer, myeloma, multiple myeloma (MM), B cell malignancies, lymphoma, B cell lymphoma, Hodgkin lymphoma, T cell lymphoma, leukemia, or acute lymphocytic leukemia (ALL). In certain embodiments, the compound comprises an antisense compound targeted to FOXP3. In certain embodiments, the compound comprises an oligonucleotide targeted to FOXP3. In certain embodiments, the compound comprises a modified oligonucleotide 8 to 80 linked nucleosides in length and having a nucleobase sequence comprising at least 8 contiguous nucleobases of any of the nucleobase sequences of SEQ ID NOs: 9-3246. In certain embodiments, the compound comprises a modified oligonucleotide 16 to 80 linked nucleosides in length and having a nucleobase sequence comprising the nucleobase sequence of any one of SEQ ID NOs: 9-3246. In certain embodiments, the compound comprises a modified oligonucleotide consisting of the nucleobase sequence of any one of SEQ ID NOs: 9-3246. In certain embodiments, the compound comprises a modified oligonucleotide of 16 to 80 linked nucleosides in length having a nucleobase sequence comprising any one of SEQ ID NOs: 449, 501, 544, 794, 1293, 1307, 1511, 1755, 2492, or 2575. In certain embodiments, the compound comprises a modified oligonucleotide having a nucleobase sequence consisting of any one of SEQ ID NOs: 449, 501, 544, 794, 1293, 1307, 1511, 1755, 2492, or 2575. In any of the foregoing embodiments, the modified oligonucleotide can be 10 to 30 linked nucleosides in length. In certain embodiments, the compound is ION 1062428, 1062641, 1062835, 1062937, 1063268, 1063649, 1063655, 1063734, 1064096, or 1064313. In any of the foregoing embodiments, the compound can be single-stranded or double-stranded. In any of the foregoing embodiments, the compound can be an antisense compound or oligomeric compound.

[0186] Certain embodiments are drawn to use of a compound comprising a FOXP3 specific inhibitor for the manufacture or preparation of a medicament for reducing or inhibiting immunosuppression, Treg immunosuppressive activity, cancer cell proliferation, tumor growth, or metastasis in an individual having cancer. Certain embodiments are drawn to use of a compound comprising a FOXP3 specific inhibitor for the manufacture or preparation of a medicament for inducing or activating anticancer or antitumor immunity; anticancer or antitumor immune response; immune cell activation or infiltration; inflammatory cell activation or infiltration; effector immune cell activation or infiltration; T cell activation or infiltration; CD8 T cell activation or infiltration; NK cell activation or infiltration; macrophage and dendritic cell activation or infiltration; inflammation; or inflammatory cytokine or chemokine expression in an individual having cancer. In certain embodiments, the cancer is a cancer having FOXP3 positive (FOXP3+) Tregs in the microenvironment or stroma or tumor draining lymph nodes, lung cancer, non-small cell lung carcinoma (NSCLC), small-cell lung carcinoma (SCLC), squamous cell carcinoma (SCC), head and neck cancer, head and neck squamous cell carcinoma (HNSCC), gastrointestinal cancer, large intestinal cancer, small intestinal cancer, stomach cancer, colon cancer, colorectal cancer, bladder cancer, liver cancer, hepatocellular carcinoma (HCC), esophageal cancer, pancreatic cancer, biliary tract cancer, gastric cancer, urothelial cancer, breast cancer, triple-negative breast cancer (TNBC), ovarian cancer, endometrial cancer, cervical cancer, prostate cancer, mesothelioma, sarcomas (e.g. epitheloid, rhabdoid and synovial), chordoma, renal cancer, renal cell carcinoma (RCC), brain cancer, neuroblastoma, glioblastoma, skin cancer, melanoma, basal cell carcinoma, merkel cell carcinoma, blood cancer, hematopoetic cancer, myeloma, multiple myeloma (MM), B cell malignancies, lymphoma, B cell lymphoma, Hodgkin lymphoma, T cell lymphoma, leukemia, or acute lymphocytic leukemia (ALL). In certain embodiments, the compound comprises an antisense compound targeted to FOXP3. In certain embodiments, the compound comprises an oligonucleotide targeted to FOXP3. In certain embodiments, the compound comprises a modified oligonucleotide 8 to 80 linked nucleosides in length and having a nucleobase sequence comprising at least 8 contiguous nucleobases of any of the nucleobase sequences of SEQ ID NOs: 9-3246. In certain embodiments, the compound comprises a modified oligonucleotide 16 to 80 linked nucleosides in length and having a nucleobase sequence comprising the nucleobase sequence of any one of SEQ ID NOs: 9-3246. In certain embodiments, the compound comprises a modified oligonucleotide consisting of the nucleobase sequence of any one of SEQ ID NOs: 9-3246. In certain embodiments, the compound comprises a modified oligonucleotide of 16 to 80 linked nucleosides in length having a nucleobase sequence comprising any one of SEQ ID NOs: 449, 501, 544, 794, 1293, 1307, 1511, 1755, 2492, or 2575. In certain embodiments, the compound comprises a modified oligonucleotide having a nucleobase sequence consisting of any one of SEQ ID NOs: 449, 501, 544, 794, 1293, 1307, 1511, 1755, 2492, or 2575. In any of the foregoing embodiments, the modified oligonucleotide can be 10 to 30 linked nucleosides in length. In certain embodiments, the compound is ION 1062428, 1062641, 1062835, 1062937, 1063268, 1063649, 1063655, 1063734, 1064096, or 1064313. In any of the foregoing embodiments, the compound can be single-stranded or double-stranded. In any of the foregoing embodiments, the compound can be an antisense compound or oligomeric compound.

[0187] In any of the foregoing methods or uses, the compound can be targeted to FOXP3. In certain embodiments, the compound comprises or consists of a modified oligonucleotide, for example a modified oligonucleotide 8 to 80 linked nucleosides in length, 10 to 30 linked nucleosides in length, 12 to 30 linked nucleosides in length, or 20 linked nucleosides in length. In certain embodiments, the modified oligonucleotide is at least 80%, 85%, 90%, 95% or 100% complementary to any of the nucleobase sequences recited in SEQ ID NOs: 1-5. In certain embodiments, the modified oligonucleotide comprises at least one modified internucleoside linkage, at least one modified sugar and/or at least one modified nucleobase. In certain embodiments, the modified internucleoside linkage is a phosphorothioate internucleoside linkage, the modified sugar is a bicyclic sugar or a 2′-O-methoxyethyl, and the modified nucleobase is a 5-methylcytosine. In certain embodiments, the modified oligonucleotide comprises a gap segment consisting of linked deoxynucleosides; a 5′ wing segment consisting of linked nucleosides; and a 3′ wing segment consisting of linked nucleosides, wherein the gap segment is positioned immediately adjacent to and between the 5′ wing segment and the 3′ wing segment and wherein each nucleoside of each wing segment comprises a modified sugar.

[0188] In any of the foregoing embodiments, the modified oligonucleotide can be 12 to 30, 15 to 30, 15 to 25, 15 to 24, 16 to 24, 17 to 24, 18 to 24, 19 to 24, 20 to 24, 19 to 22, 20 to 22, 16 to 20, or 17 or 20 linked nucleosides in length. In certain embodiments, the modified oligonucleotide is at least 80%, 85%, 90%, 95% or 100% complementary to any of the nucleobase sequences recited in SEQ ID NOs: 1-5. In certain embodiments, the modified oligonucleotide comprises at least one modified internucleoside linkage, at least one modified sugar and/or at least one modified nucleobase. In certain embodiments, the modified internucleoside linkage is a phosphorothioate internucleoside linkage, the modified sugar is a bicyclic sugar or a 2′-O-methoxyethyl, and the modified nucleobase is a 5-methylcytosine. In certain embodiments, the modified oligonucleotide comprises a gap segment consisting of linked 2′-deoxynucleosides; a 5′ wing segment consisting of linked nucleosides; and a 3′ wing segment consisting of linked nucleosides, wherein the gap segment is positioned immediately adjacent to and between the 5′ wing segment and the 3′ wing segment and wherein each nucleoside of each wing segment comprises a modified sugar.

[0189] In any of the foregoing methods or uses, the compound can comprise or consist of a modified oligonucleotide 16 to 80 linked nucleosides in length and having a nucleobase sequence comprising any one of SEQ ID NOs: 9-3246, wherein the modified oligonucleotide comprises:
[0190] a gap segment consisting of linked 2′-deoxynucleosides;
[0191] a 5′ wing segment consisting of linked nucleosides; and
[0192] a 3′ wing segment consisting of linked nucleosides;

[0193] wherein the gap segment is positioned between the 5′ wing segment and the 3′ wing segment and wherein each nucleoside of each wing segment comprises a modified sugar. In certain embodiments, the modified oligonucleotide is 16-30 linked nucleosides in length. In certain embodiments, the modified oligonucleotide is 16 linked nucleosides in length.

[0194] In any of the foregoing methods or uses, the compound can comprise or consist of a modified oligonucleotide 16-80 linked nucleobases in length having a nucleobase sequence comprising the sequence recited in any one of SEQ ID NOs: 449, 501, 544, 794, 1293, 1307, 1511, 1755, 2492, or 2575, wherein the modified oligonucleotide comprises:
[0195] a gap segment consisting of linked deoxynucleosides;
[0196] a 5′ wing segment consisting of linked nucleosides; and
[0197] a 3′ wing segment consisting of linked nucleosides;

[0198] wherein the gap segment is positioned between the 5′ wing segment and the 3′ wing segment and wherein each nucleoside of each wing segment comprises a modified sugar. In certain embodiments, the modified oligonucleotide is 16-30 linked nucleosides in length. In certain embodiments, the modified oligonucleotide is 16 linked nucleosides in length.

[0199] In any of the foregoing methods or uses, the compound can comprise or consist of a modified oligonucleotide 16-80 linked nucleobases in length having a nucleobase sequence comprising the sequence recited in any one of SEQ ID NOs: 449, 501, 544, 794, 1293, 1307, 1511, 1755, 2492, or 2575, wherein the modified oligonucleotide comprises:

[0200] a gap segment consisting of ten linked deoxynucleosides;

[0201] a 5′ wing segment consisting of three linked nucleosides; and

[0202] a 3′ wing segment consisting of three linked nucleosides;

[0203] wherein the gap segment is positioned between the 5′ wing segment and the 3′ wing segment; wherein each nucleoside of each wing segment comprises a cEt nucleoside; wherein each internucleoside linkage is a phosphorothioate linkage; and wherein each cytosine is a 5-methylcytosine. In certain embodiments, the modified oligonucleotide is 16-30 linked nucleosides in length. In certain embodiments, the modified oligonucleotide is 16 linked nucleosides in length.

[0204] In certain embodiments, a compound comprises or consists of a modified oligonucleotide 16-80 linked nucleobases in length having a nucleobase sequence comprising the sequence recited in SEQ ID NO: 449, wherein the modified oligonucleotide comprises:

[0205] a gap segment consisting of ten linked deoxynucleosides;

[0206] a 5′ wing segment consisting of three linked nucleosides; and

[0207] a 3′ wing segment consisting of three linked nucleosides;

[0208] wherein the gap segment is positioned between the 5′ wing segment and the 3′ wing segment; wherein each nucleoside of each wing segment comprises a cEt nucleoside; wherein each internucleoside linkage is a phosphorothioate linkage; and wherein each cytosine is a 5-methylcytosine. In certain embodiments, the modified oligonucleotide is 16-30 linked nucleosides in length. In certain embodiments, the modified oligonucleotide is 16 linked nucleosides in length.

[0209] In any of the foregoing methods or uses, the compound can comprise or consist of ION 1063734 or salt thereof, having the following chemical structure:

[chemical structure]

[0210] In any of the foregoing methods or uses, the compound can comprise or consist of ION 1063734, having the following chemical structure:

[chemical structure]

[0211] In any of the foregoing methods or uses, the compound can be administered parenterally. For example, in certain embodiments the compound can be administered through injection or infusion. Parenteral administration includes subcutaneous administration, intravenous administration, intramuscular administration, intraarterial administration, intraperitoneal administration, or intracranial administration, e.g. intrathecal or intracerebroventricular administration.

### Certain Combinations and Combination Therapies

[0212] In certain embodiments, a first agent comprising a compound described herein is co-administered with one or more secondary agents. In certain embodiments, such second agents are designed to treat the same disease, disorder, or condition as the first agent described herein. In certain embodiments, such second agents are designed to treat a different disease, disorder, or condition as the first agent described herein. In certain embodiments, a first agent is designed to treat an undesired side effect of a second agent. In certain embodiments, second agents are co-administered with the first agent to treat an undesired effect of the first agent. In certain embodiments, such second agents are designed to treat an undesired side effect of one or more pharmaceutical compositions as described herein. In certain embodiments, second agents are co-administered with the first agent to produce a combinational effect. In certain embodiments, second agents are co-administered with the first agent to produce a synergistic effect. In certain embodiments, the co-administration of the first and second agents permits use of lower dosages than would be required to achieve a therapeutic or prophylactic effect if the agents were administered as independent therapy.

[0213] In certain embodiments, one or more compounds or compositions provided herein are co-administered with one or more secondary agents. In certain embodiments, one or more compounds or compositions provided herein and one or more secondary agents, are administered at different times. In certain embodiments, one or more compounds or compositions provided herein and one or more secondary agents, are prepared together in a single formulation. In certain embodiments, one or more compounds or compositions provided herein and one or more secondary agents, are prepared separately.

[0214] In certain embodiments, a secondary agent is selected from: innate immune cell activators including but not limited to TLR agonists (e.g. MEDI9197) and STING agonists (e.g. MK-1454); inhibitors of immunoinhibitory mediators including but not limited to CD39 and CD73 inhibitors (e.g. oleclumab), IDO1 inhibitors (e.g. epacadostat), and arginase inhibitors (e.g. INCB001158); activators of T cell costimulatory receptors including but not limited to CD137 agonists (e.g. urelumab, utomilumab), CD27 agonists (e.g. varlimumab), and CD40 agonists (e.g. MEDI5083); inhibitors of T cell inhibitory receptors including but not limited to LAG3 inhibitors (e.g. relatlimab), TIM3 inhibitors (e.g. LY3321367), and TIGIT inhibitors (e.g. tiragolumab); activators of Treg inhibitory receptors including but not limited to GITR agonists (e.g. MEDI1873); NK cell activation strategies including but not limited to NKG2a (e.g. monalizumab); cancer vaccines (e.g. Sipuleucel-T); and immunogenic killing of the tumor including but not limited to oncolytic viruses, radiation, photodynamic therapy, and chemotherapy (e.g. anthracyclines, oxaliplatin etc).

[0215] In certain embodiments, a secondary agent is selected from: immuno-oncology (IO) agents; immune checkpoint inhibitors; immunomodulatory agents; PD1-PDL1/2 pathway inhibitors; PD-L1 inhibitors including but not limited to durvalumab, avelumab, and atezolizumab; PD-1 inhibitors including but not limited to nivolumab and pembrolizumab; CTLA-4 inhibitors including but not limited to ipilimumab and tremelimumab; STAT3 inhibitors including but not limited to STAT3 siRNA, STAT3 antisense oligonucleotides, and danvatirsen (AZD9150); and adenosine 2A receptor (A2AR) antagonists including but not limited to AZD4635.

[0216] Certain embodiments are directed to the use of a compound targeted to FOXP3 as described herein in combination with a secondary agent. In particular embodiments such use is in a method of treating a patient suffering from cancer including, but not limited to, a cancer having FOXP3 positive (FOXP3+) Tregs in the microenvironment or stroma or tumor draining lymph nodes, lung cancer, non-small cell lung carcinoma (NSCLC), small-cell lung carcinoma (SCLC), squamous cell carcinoma (SCC), head and neck cancer, head and neck squamous cell carcinoma (HNSCC), gastrointestinal cancer, large intestinal cancer, small intestinal cancer, stomach cancer, colon cancer, colorectal cancer, bladder cancer, liver cancer, hepatocellular carcinoma (HCC), esophageal cancer, pancreatic cancer, biliary tract cancer, gastric cancer, urothelial cancer, breast cancer, triple-negative breast cancer (TNBC), ovarian cancer, endometrial cancer, cervical cancer, prostate cancer, mesothelioma, sarcomas (e.g. epitheloid, rhabdoid and synovial), chordoma, renal cancer, renal cell carcinoma (RCC), brain cancer, neuroblastoma, glioblastoma, skin cancer, melanoma, basal cell carcinoma, merkel cell carcinoma, blood cancer, hematopoetic cancer, myeloma, multiple myeloma (MM), B cell malignancies, lymphoma, B cell lymphoma, Hodgkin lymphoma, T cell lymphoma, leukemia, or acute lymphocytic leukemia (ALL). In certain embodiments, a secondary agent is selected from: immuno-oncology (TO) agents; immune checkpoint inhibitors; immunomodulatory agents; PD1-PDL1/2 pathway inhibitors; PD-L1 inhibitors including but not limited to durvalumab, avelumab, and atezolizumab; PD-1 inhibitors including but not limited to nivolumab and pembrolizumab; CTLA-4 inhibitors including but not limited to ipilimumab and tremelimumab; STAT3 inhibitors including but not limited to STAT3 siRNA, STAT3 antisense oligonucleotides, and danvatirsen (AZD9150).

[0217] Certain embodiments are drawn to a combination of a compound targeted to FOXP3 as described herein and a secondary agent, such as a secondary agent selected from: immuno-oncology (TO) agents; immune checkpoint inhibitors; immunomodulatory agents; PD1-PDL1/2 pathway inhibitors; PD-L1 inhibitors including but not limited to durvalumab, avelumab, and atezolizumab; PD-1 inhibitors including but not limited to nivolumab and pembrolizumab; CTLA-4 inhibitors including but not limited to ipilimumab and tremelimumab; STAT3 inhibitors including but not limited to STAT3 siRNA, STAT3 antisense oligonucleotides, and danvatirsen (AZD9150).

[0218] In certain embodiments the compound targeted to FOXP3 as described herein and the secondary agent are used in combination treatment by administering the two agents simultaneously, separately or sequentially. In certain embodiments the two agents are formulated as a fixed dose combination product. In other embodiments the two agents are provided to the patient as separate units which can then either be taken simultaneously or serially (sequentially).

[0219] In certain embodiments, a compound targeted to FOXP3 as described herein is used in combination with an immunomodulatory agent such as an anti-PD-L1 antibody (or an antigen-binding fragment thereof), an anti-PD-1 antibody (or an antigen-binding fragment thereof), an anti-CTLA-4 antibody (or an antigen-binding fragment thereof) or an OX40 agonist ((e.g., an OX40 ligand fusion protein, or an OX40 agonist antibody or antigen-binding fragment thereof).

[0220] In certain embodiments, a compound targeted to FOXP3 as described herein is used in combination with an immune checkpoint inhibitor such as an anti-PD-L1 antibody (or an antigen-binding fragment thereof), an anti-PD-1 antibody (or an antigen-binding fragment thereof), or an anti-CTLA-4 antibody (or an antigen-binding fragment thereof).

[0221] Anti-PD-L1 antibodies are known in the art. Exemplary anti-PD-L1 antibodies include: MEDI4736 (durvalumab), MPDL3280A, BMS936559, 2.7A4, AMP-714, MDX-1105 and MPDL3280A (atezolizumab).

[0222] Anti-PD-1 antibodies are known in the art. Exemplary anti-PD-1 antibodies include: nivolumab, pembrolizumab, pidilizumab, and AMP-514

[0223] Anti-CTLA-4 antibodies are known in the art. Exemplary anti-CTLA-4 antibodies include: tremelimumab and ipilimumab, also termed MDX-010 (or BMS-734016).

[0224] OX40 agonists and antibodies are known in the art. Exemplary OX40 agonists and/or antibodies include: MEDI6383, 9B12 and MEDI0562.

[0225] In one embodiment, the combination includes the antisense oligonucleotide Ionis 651987 or a salt thereof, and at least one immunomodulator selected from the group consisting of: MEDI4736, MPDL3280A, BMS936559, 2.7A4, AMP-714, MDX-1105, nivolumab, pembrolizumab, pidilizumab, MPDL3280A, tremelimumab, ipilimumab, MEDI0562 and MEDI0562.

[0226] In one embodiment, the combination includes the anti-PD-L1 antibody MEDI4736 (duvalumab) and ION 1063734.

[0227] In one embodiment, the combination includes ION 1063734, the anti-PD-L1 antibody MEDI4736 (durvalumab) and the anti-CTLA-4 antibody tremelimumab.

### Certain Anti-PD-L1 Antibodies

[0228] Antibodies that specifically bind and inhibit PD-L1 are included in the present disclosure.

[0229] Durvalumab (MEDI4736) is an exemplary anti-PD-L1 antibody that is selective for a PD-L1 polypeptide and blocks the binding of PD-L1 to the PD-1 and CD80 receptors. Durvalumab can relieve PD-L1-mediated suppression of human T-cell activation in vitro and inhibits tumor growth in a xenograft model via a T-cell dependent mechanism.

[0230] Information regarding durvalumab (or fragments thereof) for use in the methods provided herein can be found in U.S. Pat. No. 8,779,108, the disclosure of which is incorporated herein by reference in its entirety. The fragment crystallizable (Fc) domain of durvalumab contains a triple mutation in the constant domain of the IgG1 heavy chain that reduces binding to the complement component C1q and the Fcγ receptors responsible for mediating antibody-dependent cell-mediated cytotoxicity (ADCC). In certain embodiments, MEDI4736 or an antigen-binding fragment thereof for use in the methods provided herein comprises the variable heavy chain and variable light chain CDR sequences of the 2.14H9OPT antibody as disclosed in U.S. Pat. Nos. 8,779,108 and 9,493,565, which is herein incorporated by reference in its entirety.

[0231] There are numerous anti-PD-L1 antibodies in the published literature that could feature in the present disclosure, including compounds in development and/or in clinical trials such as: durvalumab (MEDI4736), MPDL3280A, BMS936559, 2.7A4, AMP-714 and MDX-1105. Patent specifications disclosing anti-PD-L1 antibodies that may be useful in the present disclosure include: U.S. Pat. Nos. 7,943,743; 8,383,796; 9,102,725; 9,273,135 (BMS/Medarex), US2006/0153841 (Dana Farber), US2011/0271358 (Dana Farber), U.S. Pat. Nos. 8,552,154 and 9,102,727 (Dana Farber), U.S. Pat. No. 8,217,149 (Genentech), including issued U.S. Pat. No. 8,217,149, US2012/0039906 (INSERM), US2016/0031990 (Amplimmune), U.S. Pat. No. 8,779,108 (MedImmune—for durvalumab/MEDI4726 and 2.7A4), US2014/0044738 (Amplimmune—for AMP-714) and US2010/0285039 (John's Hopkins University). Each of these disclosures is herein incorporated by reference in its entirety.

### Certain Anti-CTLA-4 Antibodies

[0232] Antibodies that specifically bind CTLA-4 and inhibit CTLA-4 activity are useful for enhancing an anti-tumor immune response. Information regarding tremelimumab (or antigen-binding fragments thereof) for use in the methods provided herein can be found in U.S. Pat. No. 6,682,736 (where it is referred to as 11.2.1), the disclosure of which is incorporated herein by reference in its entirety. Tremelimumab (also known as CP-675,206, CP-675, CP-675206, and ticilimumab) is a human IgG2 monoclonal antibody that is highly selective for CTLA-4 and blocks binding of CTLA-4 to CD80 (B7.1) and CD86 (B7.2). It has been shown to result in immune activation in vitro and some patients treated with tremelimumab have shown tumor regression. In certain embodiments, tremelimumab or an antigen-binding fragment thereof for use in the methods provided herein comprises the variable heavy chain and variable light chain CDR sequences of the 11.2.1 antibody as disclosed in U.S. Pat. No. 6,682,736, which is herein incorporated by reference in its entirety.

[0233] Other anti-CTLA-4 antibodies are described, for example, in US 20070243184. In one embodiment, the anti-CTLA-4 antibody is Ipilimumab, also termed MDX-010; BMS-734016.

### Certain OX40 Agonists

[0234] OX40 agonists interact with the OX40 receptor on CD4+ T-cells during, or shortly after, priming by an antigen resulting in an increased response of the CD4+ T-cells to the antigen. An OX40 agonist interacting with the OX40 receptor on antigen specific CD4+ T-cells can increase T cell proliferation as compared to the response to antigen alone. The elevated response to the antigen can be maintained for a period of time substantially longer than in the absence of an OX40 agonist. Thus, stimulation via an OX40 agonist enhances the antigen specific immune response by boosting T-cell recognition of antigens, e.g., tumor cells. OX40 agonists are described, for example, in U.S. Pat. Nos. 6,312,700, 7,504,101, 7,622,444, and 7,959,925, which are incorporated herein by reference in their entireties. Methods of using such agonists in cancer treatment are described, for example, in US2015/0098942 and in US2015/0157710, each of which are incorporated herein by reference in its entirety.

[0235] OX40 agonists include, but are not limited to OX40 binding molecules, e.g., binding polypeptides, e.g., OX40 ligand (“OX40L”) or an OX40-binding fragment, variant, or derivative thereof, such as soluble extracellular ligand domains and OX40L fusion proteins, and anti-OX40 antibodies (for example, monoclonal antibodies such as humanized monoclonal antibodies), or an antigen-binding fragment, variant or derivative thereof. Examples of anti-OX40 monoclonal antibodies are described, for example, in U.S. Pat. Nos. 5,821,332 and 6,156,878, the disclosures of which are incorporated herein by reference in their entireties. In certain embodiments, the anti-OX40 monoclonal antibody is 9B12, or an antigen-binding fragment, variant, or derivative thereof, as described in Weinberg, A. D., et al. J Immunother 29, 575-585 (2006), which is incorporated herein by reference in its entirety. In another embodiment, an OX40 antibody is MEDI0562 as described in US 2016/0137740.

[0236] In other embodiments, the antibody which specifically binds to OX40, or an antigen-binding fragment thereof binds to the same OX40 epitope as mAb 9B12. An exemplary humanized OX40 antibody is described by Morris et al., Mol Immunol. May 2007; 44(12): 3112-3121. 9B12 is a murine IgG1, anti-OX40 mAb directed against the extracellular domain of human OX40 (CD134) (Weinberg, A. D., et al. J Immunother 29, 575-585 (2006)). It was selected from a panel of anti-OX40 monoclonal antibodies because of its ability to elicit an agonist response for OX40 signaling, stability, and for its high level of production by the hybridoma. For use in clinical applications, 9B12 mAb is equilibrated with phosphate buffered saline, pH 7.0, and its concentration is adjusted to 5.0 mg/ml by diafiltration.

[0237] “OX40 ligand” (“OX40L”) (also variously termed tumor necrosis factor ligand superfamily member 4, gp34, TAX transcriptionally-activated glycoprotein-1, and CD252) is found largely on antigen presenting cells (APCs), and can be induced on activated B cells, dendritic cells (DCs), Langerhans cells, plamacytoid DCs, and macrophages (Croft, M., (2010) Ann Rev Immunol 28:57-78). Other cells, including activated T cells, NK cells, mast cells, endothelial cells, and smooth muscle cells can express OX40L in response to inflammatory cytokines (Id.). OX40L specifically binds to the OX40 receptor. The human protein is described in U.S. Pat. No. 6,156,878. The mouse OX40L is described in U.S. Pat. No. 5,457,035. OX40L is expressed on the surface of cells and includes an intracellular, a transmembrane and an extracellular receptor-binding domain. A functionally active soluble form of OX40L can be produced by deleting the intracellular and transmembrane domains as described, e.g., in U.S. Pat. Nos. 5,457,035; 6,312,700; 6,156,878; 6,242,566; 6,528,055; 6,528,623; 7,098,184; and 7,125,670, the disclosures of which are incorporated herein for all purposes. A functionally active form of OX40L is a form that retains the capacity to bind specifically to OX40, that is, that possesses an OX40 “receptor binding domain.” An example is amino acids 51 to 183 of human OX40L. Methods of determining the ability of an OX40L molecule or derivative to bind specifically to OX40 are discussed below. Methods of making and using OX40L and its derivatives (such as derivatives that include an OX40 binding domain) are described in U.S. Pat. Nos. 6,156,878; 6,242,566; 6,528,055; 6,528,623; 7,098,184; and 7,125,670, which also describe proteins comprising the soluble form of OX40L linked to other peptides, such as human immunoglobulin (“Ig”) Fc regions, that can be produced to facilitate purification of OX40 ligand from cultured cells, or to enhance the stability of the molecule after in vivo administration to a mammal (see also, U.S. Pat. Nos. 5,457,035 and 7,959,925, both of which are incorporated by reference herein in their entireties).

[0238] Also included within the definition of OX40L are OX40 ligand variants which vary in amino acid sequence from naturally occurring OX40 ligand molecules but which retain the ability to specifically bind to an OX40 receptor. Such variants are described in U.S. Pat. Nos. 5,457,035; 6,156,878; 6,242,566; 6,528,055; 6,528,623; 7,098,184; and 7,125,670. In a related embodiment, a mutant of OX40L which has lost the ability to specifically bind to OX40, for example amino acids 51 to 183, in which the phenylalanine at position 180 of the receptor-binding domain of human OX40L has been replaced with alanine (F180A) is used.

[0239] OX40 agonists include a fusion protein in which one or more domains of OX40L is covalently linked to one or more additional protein domains. Exemplary OX40L fusion proteins that can be used as OX40 agonists are described in U.S. Pat. No. 6,312,700, the disclosure of which is incorporated herein by reference in its entirety. In one embodiment, an OX40 agonist includes an OX40L fusion polypeptide that self-assembles into a multimeric (e.g., trimeric or hexameric) OX40L fusion protein. Such fusion proteins are described, e.g., in U.S. Pat. No. 7,959,925, which is incorporated by reference herein in its entirety. The multimeric OX40L fusion protein exhibits increased efficacy in enhancing antigen specific immune response in a subject, particularly a human subject, due to its ability to spontaneously assemble into highly stable trimers and hexamers.

[0240] In another embodiment, an OX40 agonist capable of assembling into a multimeric form includes a fusion polypeptide comprising in an N-terminal to C-terminal direction: an immunoglobulin domain, wherein the immunoglobulin domain includes an Fc domain, a trimerization domain, wherein the trimerization domain includes a coiled coil trimerization domain, and a receptor binding domain, wherein the receptor binding domain is an OX40 receptor binding domain, e.g., an OX40L or an OX40-binding fragment, variant, or derivative thereof, where the fusion polypeptide can self-assemble into a trimeric fusion protein. In one aspect, an OX40 agonist capable of assembling into a multimeric form is capable of binding to the OX40 receptor and stimulating at least one OX40 mediated activity. In certain aspects, the OX40 agonist includes an extracellular domain of OX40 ligand.

[0241] The trimerization domain of an OX40 agonist capable of assembling into a multimeric form serves to promote self-assembly of individual OX40L fusion polypeptide molecules into a trimeric protein. Thus, an OX40L fusion polypeptide with a trimerization domain self-assembles into a trimeric OX40L fusion protein. In one aspect, the trimerization domain is an isoleucine zipper domain or other coiled coli polypeptide structure. Exemplary coiled coil trimerization domains include: TRAF2 (GENBANK® Accession No. Q12933, amino acids 299-348; Thrombospondin 1 (Accession No. P07996, amino acids 291-314; Matrilin-4 (Accession No. 095460, amino acids 594-618; CMP (matrilin-1) (Accession No. NP-002370, amino acids 463-496; HSF1 (Accession No. AAX42211, amino acids 165-191; and Cubilin (Accession No. NP-001072, amino acids 104-138. In certain specific aspects, the trimerization domain includes a TRAF2 trimerization domain, a Matrilin-4 trimerization domain, or a combination thereof.

[0242] OX40L FP is a human OX40 ligand IgG4P fusion protein that specifically binds to, and triggers signaling by, the human OX40 receptor, a member of the TNFR superfamily. OX40L FP is also disclosed in US2016/0024176, incorporated herein by reference in its entirety. OX40L FP is composed of three distinct domains: (1) human OX40 ligand extracellular receptor binding domains (RBDs) that form homotrimers and bind the OX40 receptor; (2) isoleucine zipper trimerization domains derived from TNFR-associated factor 2 that stabilize the homotrimeric structure of the OX40 ligand RBDs; and (3) human IgG4 fragment crystallizable gamma (Fcγ) domains that facilitate Fcγ receptor clustering of the fusion protein when bound to OX40 receptors, and contain a serine to proline substitution at position 228 (according to EU numbering) in the hinge regions (IgG4P) to promote stability of two sets of OX40 ligand RBD homotrimers. The IgG4P Fc domain is fused directly to an isoleucine zipper trimerization domain derived from amino acid residues 310-349 of human tumor necrosis factor 2 (TRAF2). Fused to the c-terminus of the TRAF2 domain are amino acid residues 51-183 of the extracellular receptor binding domain (RBD) of human OX40L (gene name TNFSF4). The TRAF2 domain stabilizes the homotrimeric structure of OX40L RBDs to enable OX40 binding and activation, while the IgG4P Fc domain confers serum stability, dimerization of OX40L trimers, and facilitates Fcγ receptor clustering of the hexameric fusion protein. One OX40L FP variant possesses a phenylalanine (F) to alanine (A) mutation at the amino acid corresponding to position 180 in OX40L. Another OX40L FP variant has the IgG4P Fc domain replaced with a human IgG1 Fc domain. In particular embodiments, the OX40 agonist for use in the present disclosure is one of the OX40L FP variants.

[0243] In particular embodiments, the OX40 agonist for use in the present disclosure has been modified to increase its serum half-life. For example, the serum half-life of an OX40 agonist can be increased by conjugation to a heterologous molecule such as serum albumin, an antibody Fc region, or PEG. In certain embodiments, OX40 agonists can be conjugated to other therapeutic agents or toxins to form immunoconjugates and/or fusion proteins. In certain embodiments, the OX40 agonist can be formulated so as to facilitate administration and promote stability of the active agent.

### Antibody Derivatives

[0244] Antibodies for use in the present disclosure (e.g., anti-CTLA-4, anti-PD-L1, anti-PD-1, anti-OX40) may include variants of these sequences that retain the ability to specifically bind their targets. Such variants may be derived from the sequence of these antibodies by a skilled artisan using techniques well known in the art. For example, amino acid substitutions, deletions, or additions, can be made in the FRs and/or in the CDRs. While changes in the FRs are usually designed to improve stability and immunogenicity of the antibody, changes in the CDRs are typically designed to increase affinity of the antibody for its target. Variants of FRs also include naturally occurring immunoglobulin allotypes. Such affinity-increasing changes may be determined empirically by routine techniques that involve altering the CDR and testing the affinity antibody for its target. For example, conservative amino acid substitutions can be made within any one of the disclosed CDRs. Various alterations can be made according to the methods described in Antibody Engineering, 2nd ed., Oxford University Press, ed. Borrebaeck, 1995. These include but are not limited to nucleotide sequences that are altered by the substitution of different codons that encode a functionally equivalent amino acid residue within the sequence, thus producing a “silent” change. For example, the nonpolar amino acids include alanine, leucine, isoleucine, valine, proline, phenylalanine, tryptophan, and methionine. The polar neutral amino acids include glycine, serine, threonine, cysteine, tyrosine, asparagine, and glutamine. The positively charged (basic) amino acids include arginine, lysine, and histidine. The negatively charged (acidic) amino acids include aspartic acid and glutamic acid.

[0245] Derivatives and analogs of antibodies of the present disclosure can be produced by various techniques well known in the art, including recombinant and synthetic methods (Maniatis (1990) Molecular Cloning, A Laboratory Manual, 2nd ed., Cold Spring Harbor Laboratory, Cold Spring Harbor, N.Y., and Bodansky et al. (1995) The Practice of Peptide Synthesis, 2nd ed., Spring Verlag, Berlin, Germany). Analogous shuffling or combinatorial techniques are also disclosed by Stemmer (Nature (1994) 370: 389-391), who describes the technique in relation to a β-lactamase gene but observes that the approach may be used for the generation of antibodies.

[0246] One may generate novel VH or VL regions carrying one or more sequences derived from the sequences disclosed herein using random mutagenesis of one or more selected VH and/or VL genes. One such technique, error-prone PCR, is described by Gram et al. (Proc. Nat. Acad. Sci. U.S.A. (1992) 89: 3576-3580).

[0247] Another method that may be used is to direct mutagenesis to CDRs of VH or VL genes. Such techniques are disclosed by Barbas et al. (Proc. Nat. Acad. Sci. U.S.A. (1994) 91: 3809-3813) and Schier et al. (J. Mol. Biol. (1996) 263: 551-567).

[0248] Similarly, one or more, or all three CDRs may be grafted into a repertoire of VH or VL domains, which are then screened for an antigen-binding fragment specific for CTLA-4 or PD-L1.

[0249] A portion of an immunoglobulin variable domain will comprise at least one of the CDRs substantially as set out herein and, optionally, intervening framework regions from the scFv fragments as set out herein. The portion may include at least about 50% of either or both of FR1 and FR4, the 50% being the C-terminal 50% of FR1 and the N-terminal 50% of FR4. Additional residues at the N-terminal or C-terminal end of the substantial part of the variable domain may be those not normally associated with naturally occurring variable domain regions. For example, construction of antibodies by recombinant DNA techniques may result in the introduction of N- or C-terminal residues encoded by linkers introduced to facilitate cloning or other manipulation steps. Other manipulation steps include the introduction of linkers to join variable domains to further protein sequences including immunoglobulin heavy chain constant regions, other variable domains (for example, in the production of diabodies), or proteinaceous labels as discussed in further detail below.

[0250] A skilled artisan will recognize that antibodies for use in the present disclosure may comprise antigen-binding fragments containing only a single CDR from either VL or VH domain. Either one of the single chain specific binding domains can be used to screen for complementary domains capable of forming a two-domain specific antigen-binding fragment capable of, for example, binding to CTLA-4 and PD-L1.

[0251] Antibodies for use in the present disclosure described herein can be linked to another functional molecule, e.g., another peptide or protein (albumin, another antibody, etc.). For example, the antibodies can be linked by chemical cross-linking or by recombinant methods. The antibodies may also be linked to one of a variety of nonproteinaceous polymers, e.g., polyethylene glycol, polypropylene glycol, or polyoxyalkylenes, in the manner set forth in U.S. Pat. Nos. 4,640,835; 4,496,689; 4,301,144; 4,670,417; 4,791,192; or 4,179,337. The antibodies can be chemically modified by covalent conjugation to a polymer, for example, to increase their circulating half-life. Exemplary polymers and methods to attach them are also shown in U.S. Pat. Nos. 4,766,106; 4,179,337; 4,495,285, and 4,609,546.

[0252] The antibodies may also be altered to have a glycosylation pattern that differs from the native pattern. For example, one or more carbohydrate moieties can be deleted and/or one or more glycosylation sites added to the original antibody. Addition of glycosylation sites to the presently disclosed antibodies may be accomplished by altering the amino acid sequence to contain glycosylation site consensus sequences known in the art. Another means of increasing the number of carbohydrate moieties on the antibodies is by chemical or enzymatic coupling of glycosides to the amino acid residues of the antibody. Such methods are described in WO 87/05330, and in Aplin et al. (1981) CRC Crit. Rev. Biochem., 22: 259-306. Removal of any carbohydrate moieties from the antibodies may be accomplished chemically or enzymatically, for example, as described by Hakimuddin et al. (1987) Arch. Biochem. Biophys., 259: 52; and Edge et al. (1981) Anal. Biochem., 118: 131 and by Thotakura et al. (1987) Meth. Enzymol., 138: 350. The antibodies may also be tagged with a detectable, or functional, label. Detectable labels include radiolabels such as 1311 or 99Tc, which may also be attached to antibodies using conventional chemistry. Detectable labels also include enzyme labels such as horseradish peroxidase or alkaline phosphatase. Detectable labels further include chemical moieties such as biotin, which may be detected via binding to a specific cognate detectable moiety, e.g., labeled avidin.

[0253] Antibodies, in which CDR sequences differ only insubstantially from those set forth herein are encompassed within the scope of this present disclosure. Typically, an amino acid is substituted by a related amino acid having similar charge, hydrophobic, or stereochemical characteristics. Such substitutions would be within the ordinary skills of an artisan. Unlike in CDRs, more substantial changes can be made in FRs without adversely affecting the binding properties of an antibody. Changes to FRs include, but are not limited to, humanizing a non-human derived or engineering certain framework residues that are important for antigen contact or for stabilizing the binding site, e.g., changing the class or subclass of the constant region, changing specific amino acid residues which might alter the effector function such as Fc receptor binding, e.g., as described in U.S. Pat. Nos. 5,624,821 and 5,648,260 and Lund et al. (1991) J. Immun. 147: 2657-2662 and Morgan et al. (1995) Immunology 86: 319-324, or changing the species from which the constant region is derived.

[0254] One of skill in the art will appreciate that the modifications described above are not all-exhaustive, and that many other modifications would be obvious to a skilled artisan in light of the teachings of the present disclosure.

### Certain Compounds

[0255] In certain embodiments, compounds described herein can be antisense compounds. In certain embodiments, the antisense compound comprises or consists of an oligomeric compound. In certain embodiments, the oligomeric compound comprises a modified oligonucleotide. In certain embodiments, the modified oligonucleotide has a nucleobase sequence complementary to that of a target nucleic acid.

[0256] In certain embodiments, a compound described herein comprises or consists of a modified oligonucleotide. In certain embodiments, the modified oligonucleotide has a nucleobase sequence complementary to that of a target nucleic acid.

[0257] In certain embodiments, a compound or antisense compound is single-stranded. Such a single-stranded compound or antisense compound comprises or consists of an oligomeric compound. In certain embodiments, such an oligomeric compound comprises or consists of an oligonucleotide and optionally a conjugate group. In certain embodiments, the oligonucleotide is an antisense oligonucleotide. In certain embodiments, the oligonucleotide is modified. In certain embodiments, the oligonucleotide of a single-stranded antisense compound or oligomeric compound comprises a self-complementary nucleobase sequence.

[0258] In certain embodiments, compounds are double-stranded. Such double-stranded compounds comprise a first modified oligonucleotide having a region complementary to a target nucleic acid and a second modified oligonucleotide having a region complementary to the first modified oligonucleotide. In certain embodiments, the modified oligonucleotide is an RNA oligonucleotide. In such embodiments, the thymine nucleobase in the modified oligonucleotide is replaced by a uracil nucleobase. In certain embodiments, compound comprises a conjugate group. In certain embodiments, one of the modified oligonucleotides is conjugated. In certain embodiments, both the modified oligonucleotides are conjugated. In certain embodiments, the first modified oligonucleotide is conjugated. In certain embodiments, the second modified oligonucleotide is conjugated. In certain embodiments, the first modified oligonucleotide is 12-30 linked nucleosides in length and the second modified oligonucleotide is 12-30 linked nucleosides in length. In certain embodiments, one of the modified oligonucleotides has a nucleobase sequence comprising at least 8 contiguous nucleobases of any of SEQ ID NOs: 9-3246.

[0259] In certain embodiments, antisense compounds are double-stranded. Such double-stranded antisense compounds comprise a first oligomeric compound having a region complementary to a target nucleic acid and a second oligomeric compound having a region complementary to the first oligomeric compound. The first oligomeric compound of such double stranded antisense compounds typically comprises or consists of a modified oligonucleotide and optionally a conjugate group. The oligonucleotide of the second oligomeric compound of such double-stranded antisense compound may be modified or unmodified. Either or both oligomeric compounds of a double-stranded antisense compound may comprise a conjugate group. The oligomeric compounds of double-stranded antisense compounds may include non-complementary overhanging nucleosides.

[0260] Examples of single-stranded and double-stranded compounds include but are not limited to oligonucleotides, siRNAs, microRNA targeting oligonucleotides, and single-stranded RNAi compounds, such as small hairpin RNAs (shRNAs), single-stranded siRNAs (ssRNAs), and microRNA mimics.

[0261] In certain embodiments, a compound described herein has a nucleobase sequence that, when written in the 5′ to 3′ direction, comprises the reverse complement of the target segment of a target nucleic acid to which it is targeted.

[0262] In certain embodiments, a compound described herein comprises an oligonucleotide 10 to 30 linked subunits in length. In certain embodiments, a compound described herein comprises an oligonucleotide 12 to 30 linked subunits in length. In certain embodiments, a compound described herein comprises an oligonucleotide 12 to 22 linked subunits in length. In certain embodiments, compound described herein comprises an oligonucleotide 14 to 30 linked subunits in length. In certain embodiments, compound described herein comprises an oligonucleotide 14 to 20 linked subunits in length. In certain embodiments, a compound described herein comprises an oligonucleotide 15 to 30 linked subunits in length. In certain embodiments, a compound described herein comprises an oligonucleotide 15 to 20 linked subunits in length. In certain embodiments, a compound described herein comprises an oligonucleotide 16 to 30 linked subunits in length. In certain embodiments, a compound described herein comprises an oligonucleotide 16 to 20 linked subunits in length. In certain embodiments, a compound described herein comprises an oligonucleotide 17 to 30 linked subunits in length. In certain embodiments, a compound described herein comprises an oligonucleotide 17 to 20 linked subunits in length. In certain embodiments, a compound described herein comprises an oligonucleotide 18 to 30 linked subunits in length. In certain embodiments, a compound described herein comprises an oligonucleotide 18 to 21 linked subunits in length. In certain embodiments, a compound described herein comprises an oligonucleotide 18 to 20 linked subunits in length. In certain embodiments, a compound described herein comprises an oligonucleotide 20 to 30 linked subunits in length. In other words, such oligonucleotides are 12 to 30 linked subunits, 14 to 30 linked subunits, 14 to 20 subunits, 15 to 30 subunits, 15 to 20 subunits, 16 to 30 subunits, 16 to 20 subunits, 17 to 30 subunits, 17 to 20 subunits, 18 to 30 subunits, 18 to 20 subunits, 18 to 21 subunits, 20 to 30 subunits, or 12 to 22 linked subunits in length, respectively. In certain embodiments, a compound described herein comprises an oligonucleotide 14 linked subunits in length. In certain embodiments, a compound described herein comprises an oligonucleotide 16 linked subunits in length. In certain embodiments, a compound described herein comprises an oligonucleotide 17 linked subunits in length. In certain embodiments, compound described herein comprises an oligonucleotide 18 linked subunits in length. In certain embodiments, a compound described herein comprises an oligonucleotide 19 linked subunits in length. In certain embodiments, a compound described herein comprises an oligonucleotide 20 linked subunits in length. In other embodiments, a compound described herein comprises an oligonucleotide 8 to 80, 12 to 50, 13 to 30, 13 to 50, 14 to 30, 14 to 50, 15 to 30, 15 to 50, 16 to 30, 16 to 50, 17 to 30, 17 to 50, 18 to 22, 18 to 24, 18 to 30, 18 to 50, 19 to 22, 19 to 30, 19 to 50, or 20 to 30 linked subunits. In certain such embodiments, the compound described herein comprises an oligonucleotide 8, 9, 10, 11, 12, 13, 14, 15, 16, 17, 18, 19, 20, 21, 22, 23, 24, 25, 26, 27, 28, 29, 30, 31, 32, 33, 34, 35, 36, 37, 38, 39, 40, 41, 42, 43, 44, 45, 46, 47, 48, 49, 50, 51, 52, 53, 54, 55, 56, 57, 58, 59, 60, 61, 62, 63, 64, 65, 66, 67, 68, 69, 70, 71, 72, 73, 74, 75, 76, 77, 78, 79, or 80 linked subunits in length, or a range defined by any two of the above values. In some embodiments the linked subunits are nucleotides, nucleosides, or nucleobases.

[0263] In certain embodiments, the compound may further comprise additional features or elements, such as a conjugate group, that are attached to the oligonucleotide. In certain embodiments, such compounds are antisense compounds. In certain embodiments, such compounds are oligomeric compounds. In embodiments where a conjugate group comprises a nucleoside (i.e. a nucleoside that links the conjugate group to the oligonucleotide), the nucleoside of the conjugate group is not counted in the length of the oligonucleotide.

[0264] In certain embodiments, compounds may be shortened or truncated. For example, a single subunit may be deleted from the 5′ end (5′ truncation), or alternatively from the 3′ end (3′ truncation). A shortened or truncated compound targeted to an FOXP3 nucleic acid may have two subunits deleted from the 5′ end, or alternatively may have two subunits deleted from the 3′ end, of the compound. Alternatively, the deleted nucleosides may be dispersed throughout the compound.

[0265] When a single additional subunit is present in a lengthened compound, the additional subunit may be located at the 5′ or 3′ end of the compound. When two or more additional subunits are present, the added subunits may be adjacent to each other, for example, in a compound having two subunits added to the 5′ end (5′ addition), or alternatively to the 3′ end (3′ addition), of the compound. Alternatively, the added subunits may be dispersed throughout the compound.

[0266] It is possible to increase or decrease the length of a compound, such as an oligonucleotide, and/or introduce mismatch bases without eliminating activity (Woolf et al. Proc. Natl. Acad. Sci. USA 1992, 89:7305-7309; Gautschi et al. J. Natl. Cancer Inst. March 2001, 93:463-471; Maher and Dolnick Nuc. Acid. Res. 1998, 16:3341-3358). However, seemingly small changes in oligonucleotide sequence, chemistry and motif can make large differences in one or more of the many properties required for clinical development (Seth et al. J. Med. Chem. 2009, 52, 10; Egli et al. J. Am. Chem. Soc. 2011, 133, 16642).

[0267] In certain embodiments, compounds described herein are interfering RNA compounds (RNAi), which include double-stranded RNA compounds (also referred to as short-interfering RNA or siRNA) and single-stranded RNAi compounds (or ssRNA). Such compounds work at least in part through the RISC pathway to degrade and/or sequester a target nucleic acid (thus, include microRNA/microRNA-mimic compounds). As used herein, the term siRNA is meant to be equivalent to other terms used to describe nucleic acid molecules that are capable of mediating sequence specific RNAi, for example short interfering RNA (siRNA), double-stranded RNA (dsRNA), micro-RNA (miRNA), short hairpin RNA (shRNA), short interfering oligonucleotide, short interfering nucleic acid, short interfering modified oligonucleotide, chemically modified siRNA, post-transcriptional gene silencing RNA (ptgsRNA), and others. In addition, as used herein, the term “RNAi” is meant to be equivalent to other terms used to describe sequence specific RNA interference, such as post transcriptional gene silencing, translational inhibition, or epigenetics.

[0268] In certain embodiments, a compound described herein can comprise any of the oligonucleotide sequences targeted to FOXP3 described herein. In certain embodiments, the compound can be double-stranded. In certain embodiments, the compound comprises a first strand comprising at least an 8, 9, 10, 11, 12, 13, 14, 15, 16, 17, 18, 19, or 20 contiguous nucleobase portion of any one of SEQ ID NOs: 9-3246 and a second strand. In certain embodiments, the compound comprises a first strand comprising the nucleobase sequence of any one of SEQ ID NOs: 9-3246 and a second strand. In certain embodiments, the compound comprises ribonucleotides in which the first strand has uracil (U) in place of thymine (T) in any one of SEQ ID NOs: 9-3246. In certain embodiments, the compound comprises (i) a first strand comprising a nucleobase sequence complementary to the site on FOXP3 to which any of SEQ ID NOs: 9-3246 is targeted, and (ii) a second strand. In certain embodiments, the compound comprises one or more modified nucleotides in which the 2′ position in the sugar contains a halogen (such as fluorine group; 2′-F) or contains an alkoxy group (such as a methoxy group; 2′-OMe). In certain embodiments, the compound comprises at least one 2′-F sugar modification and at least one 2′-OMe sugar modification. In certain embodiments, the at least one 2′-F sugar modification and at least one 2′-OMe sugar modification are arranged in an alternating pattern for at least 2, 3, 4, 5, 6, 7, 8, 9, 10, 11, 12, 13, 14, 15, 16, 17, 18, 19, or 20 contiguous nucleobases along a strand of the dsRNA compound. In certain embodiments, the compound comprises one or more linkages between adjacent nucleotides other than a naturally-occurring phosphodiester linkage. Examples of such linkages include phosphoramide, phosphorothioate, and phosphorodithioate linkages. The compounds may also be chemically modified nucleic acid molecules as taught in U.S. Pat. No. 6,673,661. In other embodiments, the compound contains one or two capped strands, as disclosed, for example, by WO 00/63364, filed Apr. 19, 2000.

[0269] In certain embodiments, the first strand of the compound is an siRNA guide strand and the second strand of the compound is an siRNA passenger strand. In certain embodiments, the second strand of the compound is complementary to the first strand. In certain embodiments, each strand of the compound is 16, 17, 18, 19, 20, 21, 22, or 23 linked nucleosides in length. In certain embodiments, the first or second strand of the compound can comprise a conjugate group.

[0270] In certain embodiments, a compound described herein can comprise any of the oligonucleotide sequences targeted to FOXP3 described herein. In certain embodiments, the compound is single stranded. In certain embodiments, such a compound is a single-stranded RNAi (ssRNAi) compound. In certain embodiments, the compound comprises at least an 8, 9, 10, 11, 12, 13, 14, 15, 16, 17, 18, 19, or 20 contiguous nucleobase portion of any one of SEQ ID NOs: 9-3246. In certain embodiments, the compound comprises the nucleobase sequence of any one of SEQ ID NOs: 9-3246. In certain embodiments, the compound comprises ribonucleotides in which uracil (U) is in place of thymine (T) in any one of SEQ ID NOs: 9-3246. In certain embodiments, the compound comprises a nucleobase sequence complementary to the site on FOXP3 to which any of SEQ ID NOs: 9-3246 is targeted. In certain embodiments, the compound comprises one or more modified nucleotides in which the 2′ position in the sugar contains a halogen (such as fluorine group; 2′-F) or contains an alkoxy group (such as a methoxy group; 2′-OMe). In certain embodiments, the compound comprises at least one 2′-F sugar modification and at least one 2′-OMe sugar modification. In certain embodiments, the at least one 2′-F sugar modification and at least one 2′-OMe sugar modification are arranged in an alternating pattern for at least 2, 3, 4, 5, 6, 7, 8, 9, 10, 11, 12, 13, 14, 15, 16, 17, 18, 19, or 20 contiguous nucleobases along a strand of the compound. In certain embodiments, the compound comprises one or more linkages between adjacent nucleotides other than a naturally-occurring phosphodiester linkage. Examples of such linkages include phosphoramide, phosphorothioate, and phosphorodithioate linkages. The compounds may also be chemically modified nucleic acid molecules as taught in U.S. Pat. No. 6,673,661. In other embodiments, the compound contains a capped strand, as disclosed, for example, by WO 00/63364, filed Apr. 19, 2000. In certain embodiments, the compound consists of 16, 17, 18, 19, 20, 21, 22, or 23 linked nucleosides. In certain embodiments, the compound can comprise a conjugate group.

[0271] In certain embodiments, compounds described herein comprise modified oligonucleotides. Certain modified oligonucleotides have one or more asymmetric center and thus give rise to enantiomers, diastereomers, and other stereoisomeric configurations that may be defined, in terms of absolute stereochemistry, as (R) or (S), as a or 13 such as for sugar anomers, or as (D) or (L) such as for amino acids etc. Included in the modified oligonucleotides provided herein are all such possible isomers, including their racemic and optically pure forms, unless specified otherwise. Likewise, all cis- and trans-isomers and tautomeric forms are also included.

[0272] The compounds described herein include variations in which one or more atoms are replaced with a non-radioactive isotope or radioactive isotope of the indicated element. For example, compounds herein that comprise hydrogen atoms encompass all possible deuterium substitutions for each of the ¹H hydrogen atoms. Isotopic substitutions encompassed by the compounds herein include but are not limited to: ²H or ³H in place of ¹H, ¹³C or ¹⁴C in place of ¹²C, ¹⁵N in place of ¹⁴N, ¹⁷O or ¹⁸O in place of ¹⁶O, and ³³S, ³⁴S, ³⁵S, or ³⁶S in place of ³²S. In certain embodiments, non-radioactive isotopic substitutions may impart new properties on the compound that are beneficial for use as a therapeutic or research tool. In certain embodiments, radioactive isotopic substitutions may make the compound suitable for research or diagnostic purposes, such as an imaging assay.

### Certain Mechanisms

[0273] In certain embodiments, compounds described herein comprise or consist of modified oligonucleotides. In certain embodiments, compounds described herein are antisense compounds. In certain embodiments, compounds comprise oligomeric compounds. In certain embodiments, compounds described herein are capable of hybridizing to a target nucleic acid, resulting in at least one antisense activity. In certain embodiments, compounds described herein selectively affect one or more target nucleic acid. Such compounds comprise a nucleobase sequence that hybridizes to one or more target nucleic acid, resulting in one or more desired antisense activity and does not hybridize to one or more non-target nucleic acid or does not hybridize to one or more non-target nucleic acid in such a way that results in a significant undesired antisense activity.

[0274] In certain antisense activities, hybridization of a compound described herein to a target nucleic acid results in recruitment of a protein that cleaves the target nucleic acid. For example, certain compounds described herein result in RNase H mediated cleavage of the target nucleic acid. RNase H is a cellular endonuclease that cleaves the RNA strand of an RNA:DNA duplex. The DNA in such an RNA:DNA duplex need not be unmodified DNA. In certain embodiments, compounds described herein are sufficiently “DNA-like” to elicit RNase H activity. Further, in certain embodiments, one or more non-DNA-like nucleoside in the gap of a gapmer is tolerated.

[0275] In certain antisense activities, compounds described herein or a portion of the compound is loaded into an RNA-induced silencing complex (RISC), ultimately resulting in cleavage of the target nucleic acid. For example, certain compounds described herein result in cleavage of the target nucleic acid by Argonaute. Compounds that are loaded into RISC are RNAi compounds. RNAi compounds may be double-stranded (siRNA) or single-stranded (ssRNA).

[0276] In certain embodiments, hybridization of compounds described herein to a target nucleic acid does not result in recruitment of a protein that cleaves that target nucleic acid. In certain such embodiments, hybridization of the compound to the target nucleic acid results in alteration of splicing of the target nucleic acid. In certain embodiments, hybridization of the compound to a target nucleic acid results in inhibition of a binding interaction between the target nucleic acid and a protein or other nucleic acid. In certain such embodiments, hybridization of the compound to a target nucleic acid results in alteration of translation of the target nucleic acid.

[0277] Antisense activities may be observed directly or indirectly. In certain embodiments, observation or detection of an antisense activity involves observation or detection of a change in an amount of a target nucleic acid or protein encoded by such target nucleic acid, a change in the ratio of splice variants of a nucleic acid or protein, and/or a phenotypic change in a cell or animal.

### Target Nucleic Acids, Target Regions and Nucleotide Sequences

[0278] In certain embodiments, compounds described herein comprise or consist of an oligonucleotide comprising a region that is complementary to a target nucleic acid. In certain embodiments, the target nucleic acid is an endogenous RNA molecule. In certain embodiments, the target nucleic acid encodes a protein. In certain such embodiments, the target nucleic acid is selected from: an mRNA and a pre-mRNA, including intronic, exonic and untranslated regions. In certain embodiments, the target RNA is an mRNA. In certain embodiments, the target nucleic acid is a pre-mRNA. In certain such embodiments, the target region is entirely within an intron. In certain embodiments, the target region spans an intron/exon junction. In certain embodiments, the target region is at least 50% within an intron.

[0279] Nucleotide sequences that encode FOXP3 include, without limitation, the following: RefSEQ No. NM_014009.3 (SEQ ID NO: 1); NT_011568.12_TRUNC_11907130_11921808_COMP (SEQ ID NO: 2); NM_001114377.1 (SEQ ID NO: 3); NC_000023.11_TRUNC_49247001_49273000_COMP (SEQ ID NO: 4); or UCSC Accession No. UC064ZFP.1 corresponding to genomic co-ordinates chrX:49,251,334-49,259,240 on assembly GRCh38/hg38 (SEQ ID NO: 5); each of which is incorporated by reference in its entirety.

### Hybridization

[0280] In some embodiments, hybridization occurs between a compound disclosed herein and a FOXP3 nucleic acid. The most common mechanism of hybridization involves hydrogen bonding (e.g., Watson-Crick, Hoogsteen or reversed Hoogsteen hydrogen bonding) between complementary nucleobases of the nucleic acid molecules.

[0281] Hybridization can occur under varying conditions. Hybridization conditions are sequence-dependent and are determined by the nature and composition of the nucleic acid molecules to be hybridized.

[0282] Methods of determining whether a sequence is specifically hybridizable to a target nucleic acid are well known in the art. In certain embodiments, the compounds provided herein are specifically hybridizable with a FOXP3 nucleic acid.

### Complementarity

[0283] An oligonucleotide is said to be complementary to another nucleic acid when the nucleobase sequence of such oligonucleotide or one or more regions thereof matches the nucleobase sequence of another oligonucleotide or nucleic acid or one or more regions thereof when the two nucleobase sequences are aligned in opposing directions. Nucleobase matches or complementary nucleobases, as described herein, are limited to the following pairs: adenine (A) and thymine (T), adenine (A) and uracil (U), cytosine (C) and guanine (G), and 5-methyl cytosine (mC) and guanine (G) unless otherwise specified. Complementary oligonucleotides and/or nucleic acids need not have nucleobase complementarity at each nucleoside and may include one or more nucleobase mismatches. An oligonucleotide is fully complementary or 100% complementary when such oligonucleotides have nucleobase matches at each nucleoside without any nucleobase mismatches.

[0284] In certain embodiments, compounds described herein comprise or consist of modified oligonucleotides. In certain embodiments, compounds described herein are antisense compounds. In certain embodiments, compounds comprise oligomeric compounds. Non-complementary nucleobases between a compound and a FOXP3 nucleic acid may be tolerated provided that the compound remains able to specifically hybridize to a target nucleic acid. Moreover, a compound may hybridize over one or more segments of a FOXP3 nucleic acid such that intervening or adjacent segments are not involved in the hybridization event (e.g., a loop structure, mismatch or hairpin structure).

[0285] In certain embodiments, the compounds provided herein, or a specified portion thereof, are, are at least, or are up to 70%, 80%, 85%, 86%, 87%, 88%, 89%, 90%, 91%, 92%, 93%, 94%, 95%, 96%, 97%, 98%, 99%, or 100% complementary to a FOXP3 nucleic acid, a target region, target segment, or specified portion thereof. In certain embodiments, the compounds provided herein, or a specified portion thereof, are 70% to 75%, 75% to 80%, 80% to 85%, 85% to 90%, 90% to 95%, 95% to 100%, or any number in between these ranges, complementary to a FOXP3 nucleic acid, a target region, target segment, or specified portion thereof. Percent complementarity of a compound with a target nucleic acid can be determined using routine methods.

[0286] For example, a compound in which 18 of 20 nucleobases of the compound are complementary to a target region, and would therefore specifically hybridize, would represent 90 percent complementarity. In this example, the remaining non-complementary nucleobases may be clustered or interspersed with complementary nucleobases and need not be contiguous to each other or to complementary nucleobases. As such, a compound which is 18 nucleobases in length having four non-complementary nucleobases which are flanked by two regions of complete complementarity with the target nucleic acid would have 77.8% overall complementarity with the target nucleic acid. Percent complementarity of a compound with a region of a target nucleic acid can be determined routinely using BLAST programs (basic local alignment search tools) and PowerBLAST programs known in the art (Altschul et al., J. Mol. Biol., 1990, 215, 403 410; Zhang and Madden, Genome Res., 1997, 7, 649 656). Percent homology, sequence identity or complementarity, can be determined by, for example, the Gap program (Wisconsin Sequence Analysis Package, Version 8 for Unix, Genetics Computer Group, University Research Park, Madison Wis.), using default settings, which uses the algorithm of Smith and Waterman (Adv. Appl. Math., 1981, 2, 482 489).

[0287] In certain embodiments, compounds described herein, or specified portions thereof, are fully complementary (i.e. 100% complementary) to a target nucleic acid, or specified portion thereof. For example, a compound may be fully complementary to a FOXP3 nucleic acid, or a target region, or a target segment or target sequence thereof. As used herein, “fully complementary” means each nucleobase of a compound is complementary to the corresponding nucleobase of a target nucleic acid. For example, a 20 nucleobase compound is fully complementary to a target sequence that is 400 nucleobases long, so long as there is a corresponding 20 nucleobase portion of the target nucleic acid that is fully complementary to the compound. Fully complementary can also be used in reference to a specified portion of the first and/or the second nucleic acid. For example, a 20 nucleobase portion of a 30 nucleobase compound can be “fully complementary” to a target sequence that is 400 nucleobases long. The 20 nucleobase portion of the 30 nucleobase compound is fully complementary to the target sequence if the target sequence has a corresponding 20 nucleobase portion wherein each nucleobase is complementary to the 20 nucleobase portion of the compound. At the same time, the entire 30 nucleobase compound may or may not be fully complementary to the target sequence, depending on whether the remaining 10 nucleobases of the compound are also complementary to the target sequence.

[0288] In certain embodiments, compounds described herein comprise one or more mismatched nucleobases relative to the target nucleic acid. In certain such embodiments, antisense activity against the target is reduced by such mismatch, but activity against a non-target is reduced by a greater amount. Thus, in certain such embodiments selectivity of the compound is improved. In certain embodiments, the mismatch is specifically positioned within an oligonucleotide having a gapmer motif. In certain such embodiments, the mismatch is at position 1, 2, 3, 4, 5, 6, 7, or 8 from the 5′-end of the gap region. In certain such embodiments, the mismatch is at position 9, 8, 7, 6, 5, 4, 3, 2, 1 from the 3′-end of the gap region. In certain such embodiments, the mismatch is at position 1, 2, 3, or 4 from the 5′-end of the wing region. In certain such embodiments, the mismatch is at position 4, 3, 2, or 1 from the 3′-end of the wing region. In certain embodiments, the mismatch is specifically positioned within an oligonucleotide not having a gapmer motif. In certain such embodiments, the mismatch is at position 1, 2, 3, 4, 5, 6, 7, 8, 9, 10, 11, or 12 from the 5′-end of the oligonucleotide. In certain such embodiments, the mismatch is at position, 2, 3, 4, 5, 6, 7, 8, 9, 10, 11, or 12 from the 3′-end of the oligonucleotide.

[0289] The location of a non-complementary nucleobase may be at the 5′ end or 3′ end of the compound. Alternatively, the non-complementary nucleobase or nucleobases may be at an internal position of the compound. When two or more non-complementary nucleobases are present, they may be contiguous (i.e. linked) or non-contiguous. In one embodiment, a non-complementary nucleobase is located in the wing segment of a gapmer oligonucleotide.

[0290] In certain embodiments, compounds described herein that are, or are up to 11, 12, 13, 14, 15, 16, 17, 18, 19, or 20 nucleobases in length comprise no more than 4, no more than 3, no more than 2, or no more than 1 non-complementary nucleobase(s) relative to a target nucleic acid, such as a FOXP3 nucleic acid, or specified portion thereof.

[0291] In certain embodiments, compounds described herein that are, or are up to 11, 12, 13, 14, 15, 16, 17, 18, 19, 20, 21, 22, 23, 24, 25, 26, 27, 28, 29, or 30 nucleobases in length comprise no more than 6, no more than 5, no more than 4, no more than 3, no more than 2, or no more than 1 non-complementary nucleobase(s) relative to a target nucleic acid, such as a FOXP3 nucleic acid, or specified portion thereof. In certain embodiments, compounds described herein also include those which are complementary to a portion of a target nucleic acid. As used herein, “portion” refers to a defined number of contiguous (i.e. linked) nucleobases within a region or segment of a target nucleic acid. A “portion” can also refer to a defined number of contiguous nucleobases of a compound. In certain embodiments, the—compounds, are complementary to at least an 8 nucleobase portion of a target segment. In certain embodiments, the compounds are complementary to at least a 9 nucleobase portion of a target segment. In certain embodiments, the compounds are complementary to at least a 10 nucleobase portion of a target segment. In certain embodiments, the compounds are complementary to at least an 11 nucleobase portion of a target segment. In certain embodiments, the compounds are complementary to at least a 12 nucleobase portion of a target segment. In certain embodiments, the compounds are complementary to at least a 13 nucleobase portion of a target segment. In certain embodiments, the compounds are complementary to at least a 14 nucleobase portion of a target segment. In certain embodiments, the compounds are complementary to at least a 15 nucleobase portion of a target segment. In certain embodiments, the compounds are complementary to at least a 16 nucleobase portion of a target segment. Also contemplated are compounds that are complementary to at least a 9, 10, 11, 12, 13, 14, 15, 16, 17, 18, 19, 20, or more nucleobase portion of a target segment, or a range defined by any two of these values.

### Identity

[0292] The compounds provided herein may also have a defined percent identity to a particular nucleotide sequence, SEQ ID NO, or compound represented by a specific ION number, or portion thereof. In certain embodiments, compounds described herein are antisense compounds or oligomeric compounds. In certain embodiments, compounds described herein are modified oligonucleotides. As used herein, a compound is identical to the sequence disclosed herein if it has the same nucleobase pairing ability. For example, a RNA which contains uracil in place of thymidine in a disclosed DNA sequence would be considered identical to the DNA sequence since both uracil and thymidine pair with adenine. Shortened and lengthened versions of the compounds described herein as well as compounds having non-identical bases relative to the compounds provided herein also are contemplated. The non-identical bases may be adjacent to each other or dispersed throughout the compound. Percent identity of an compound is calculated according to the number of bases that have identical base pairing relative to the sequence to which it is being compared.

[0293] In certain embodiments, compounds described herein, or portions thereof, are, or are at least, 70%, 75%, 80%, 85%, 90%, 91%, 92%, 93%, 94%, 95%, 96%, 97%, 98%, 99% or 100% identical to one or more of the compounds or SEQ ID NOs, or a portion thereof, disclosed herein. In certain embodiments, compounds described herein are about 70%, 75%, 80%, 85%, 90%, 91%, 92%, 93%, 94%, 95%, 96%, 97%, 98%, or 99% identical, or any percentage between such values, to a particular nucleotide sequence, SEQ ID NO, or compound represented by a specific ION number, or portion thereof, in which the compounds comprise an oligonucleotide having one or more mismatched nucleobases. In certain such embodiments, the mismatch is at position 1, 2, 3, 4, 5, 6, 7, 8, 9, 10, 11, or 12 from the 5′-end of the oligonucleotide. In certain such embodiments, the mismatch is at position, 2, 3, 4, 5, 6, 7, 8, 9, 10, 11, or 12 from the 3′-end of the oligonucleotide.

[0294] In certain embodiments, compounds described herein comprise or consist of antisense compounds. In certain embodiments, a portion of the antisense compound is compared to an equal length portion of the target nucleic acid. In certain embodiments, an 8, 9, 10, 11, 12, 13, 14, 15, 16, 17, 18, 19, 20, 21, 22, 23, 24, or 25 nucleobase portion is compared to an equal length portion of the target nucleic acid.

[0295] In certain embodiments, compounds described herein comprise or consist of oligonucleotides. In certain embodiments, a portion of the oligonucleotide is compared to an equal length portion of the target nucleic acid. In certain embodiments, an 8, 9, 10, 11, 12, 13, 14, 15, 16, 17, 18, 19, 20, 21, 22, 23, 24, or 25 nucleobase portion is compared to an equal length portion of the target nucleic acid.

### Certain Modified Compounds

[0296] In certain embodiments, compounds described herein comprise or consist of oligonucleotides consisting of linked nucleosides. Oligonucleotides may be unmodified oligonucleotides (RNA or DNA) or may be modified oligonucleotides. Modified oligonucleotides comprise at least one modification relative to unmodified RNA or DNA (i.e., comprise at least one modified nucleoside (comprising a modified sugar moiety and/or a modified nucleobase) and/or at least one modified internucleoside linkage).

[0297] A. Modified Nucleosides

[0298] Modified nucleosides comprise a modified sugar moiety or a modified nucleobase or both a modified sugar moiety and a modified nucleobase.

[0299] 1. Modified Sugar Moieties

[0300] In certain embodiments, sugar moieties are non-bicyclic modified sugar moieties. In certain embodiments, modified sugar moieties are bicyclic or tricyclic sugar moieties. In certain embodiments, modified sugar moieties are sugar surrogates. Such sugar surrogates may comprise one or more substitutions corresponding to those of other types of modified sugar moieties.

[0301] In certain embodiments, modified sugar moieties are non-bicyclic modified sugar moieties comprising a furanosyl ring with one or more acyclic substituent, including but not limited to substituents at the 2′, 4′, and/or 5′ positions. In certain embodiments one or more acyclic substituent of non-bicyclic modified sugar moieties is branched. Examples of 2′-substituent groups suitable for non-bicyclic modified sugar moieties include but are not limited to: 2′-F, 2′—OCH₃ (“OMe” or “O-methyl”), and 2′-O(CH₂)₂OCH₃ (“MOE”). In certain embodiments, 2′-substituent groups are selected from among: halo, allyl, amino, azido, SH, CN, OCN, CF₃, OCF₃, O—C₁-C₁₀ alkoxy, O—C₁-C₁₀ substituted alkoxy, O—C₁-C₁₀ alkyl, O—C₁-C₁₀ substituted alkyl, S-alkyl, N(Rₘ)-alkyl, O-alkenyl, S-alkenyl, N(Rₘ)-alkenyl, O-alkynyl, S-alkynyl, N(Rₘ)-alkynyl, O-alkylenyl-O-alkyl, alkynyl, alkaryl, aralkyl, O-alkaryl, O-aralkyl, O(CH₂)₂SCH₃, O(CH₂)₂ON(Rₘ)(R₁₁) or OCH₂C(═O)—N(Rₘ)(Rₙ), where each Rₘ and Rₙ is, independently, H, an amino protecting group, or substituted or unsubstituted C₁-C₁₀ alkyl, and the 2′-substituent groups described in Cook et al., U.S. Pat. No. 6,531,584; Cook et al., U.S. Pat. No. 5,859,221; and Cook et al., U.S. Pat. No. 6,005,087. Certain embodiments of these 2′-substituent groups can be further substituted with one or more substituent groups independently selected from among: hydroxyl, amino, alkoxy, carboxy, benzyl, phenyl, nitro (NO₂), thiol, thioalkoxy, thioalkyl, halogen, alkyl, aryl, alkenyl and alkynyl. Examples of 4′-substituent groups suitable for linearly non-bicyclic modified sugar moieties include but are not limited to alkoxy (e.g., methoxy), alkyl, and those described in Manoharan et al., WO 2015/106128. Examples of 5′-substituent groups suitable for non-bicyclic modified sugar moieties include but are not limited to: 5′-methyl (R or S), 5′-vinyl, and 5′-methoxy. In certain embodiments, non-bicyclic modified sugars comprise more than one non-bridging sugar substituent, for example, 2′-F-5′-methyl sugar moieties and the modified sugar moieties and modified nucleosides described in Migawa et al., US2010/190837 and Rajeev et al., US2013/0203836.

[0302] In certain embodiments, a 2′-substituted nucleoside or 2′-non-bicyclic modified nucleoside comprises a sugar moiety comprising a linear 2′-substituent group selected from: F, NH₂, N₃, OCF₃, OCH₃, O(CH₂)₃NH₂, CH₂CH═CH₂, OCH₂CH═CH₂, OCH₂CH₂OCH₃, O(CH₂)₂SCH₃, O(CH₂)₂ON(Rₘ)(Rₙ), O(CH₂)₂O(CH₂)₂N(CH₃)₂, and N-substituted acetamide (OCH₂C(═O)—N(Rₘ)(Rₙ)), where each Rₘ and Rₙ is, independently, H, an amino protecting group, or substituted or unsubstituted C₁-C₁₀ alkyl.

[0303] In certain embodiments, a 2′-substituted nucleoside or 2′-non-bicyclic modified nucleoside comprises a sugar moiety comprising a linear 2′-substituent group selected from: F, OCF₃, OCH₃, OCH₂CH₂OCH₃, O(CH₂)₂SCH₃, O(CH₂)₂ON(CH₃)₂, O(CH₂)₂O(CH₂)₂N(CH₃)₂, and OCH₂C(═O)—N(H)CH₃ (“NMA”).

[0304] In certain embodiments, a 2′-substituted nucleoside or 2′-non-bicyclic modified nucleoside comprises a sugar moiety comprising a linear 2′-substituent group selected from: F, OCH₃, and OCH₂CH₂OCH₃.

[0305] Nucleosides comprising modified sugar moieties, such as non-bicyclic modified sugar moieties, are referred to by the position(s) of the substitution(s) on the sugar moiety of the nucleoside. For example, nucleosides comprising 2′-substituted or 2-modified sugar moieties are referred to as 2′-substituted nucleosides or 2-modified nucleosides.

[0306] Certain modified sugar moieties comprise a bridging sugar substituent that forms a second ring resulting in a bicyclic sugar moiety. In certain such embodiments, the bicyclic sugar moiety comprises a bridge between the 4′ and the 2′ furanose ring atoms. Examples of such 4′ to 2′ bridging sugar substituents include but are not limited to: 4′-CH₂-2′, 4′-(CH₂)₂-2′, 4′-(CH₂)₃-2′, (“LNA”), 4′-(CH₂)₂—O-2′ (“ENA”), 4′-CH(CH₃)—O-2′ (referred to as “constrained ethyl” or “cEt” when in the S configuration), 4′-CH₂-4′-CH₂—N(R)-2′, 4′-CH(CH₂OCH₃)—O-2′ (“constrained MOE” or “cMOE”) and analogs thereof (see, e.g., Seth et al., U.S. Pat. No. 7,399,845, Bhat et al., U.S. Pat. No. 7,569,686, Swayze et al., U.S. Pat. No. 7,741,457, and Swayze et al., U.S. Pat. No. 8,022,193), 4′-C(CH₃)(CH₃)—O-2′ and analogs thereof (see, e.g., Seth et al., U.S. Pat. No. 8,278,283), 4′-CH₂—N(OCH₃)-2′ and analogs thereof (see, e.g., Prakash et al., U.S. Pat. No. 8,278,425), 4′-CH₂—O—N(CH₃)-2′ (see, e.g., Allerson et al., U.S. Pat. No. 7,696,345 and Allerson et al., U.S. Pat. No. 8,124,745), 4′-CH₂—C(H)(CH₃)-2′ (see, e.g., Zhou, et al., J. Org. Chem., 2009, 74, 118-134), 4′-CH₂—C(═CH₂)-2′ and analogs thereof (see e.g., Seth et al., U.S. Pat. No. 8,278,426), 4′-C(RₐR_{b})—N(R)—O-2′, 4′—C(RₐR_{b})—O—N(R)-2′, 4′-CH₂—O—N(R)-2′, and 4′-CH₂—N(R)—O-2′, wherein each R, Rₐ, and R_{b} is, independently, H, a protecting group, or C₁-C₁₂ alkyl (see, e.g. Imanishi et al., U.S. Pat. No. 7,427,672).

[0307] In certain embodiments, such 4′ to 2′ bridges independently comprise from 1 to 4 linked groups independently selected from: —[C(Rₐ)(R_{b})]ₙ—, —[C(Rₐ)(R_{b})]ₙ—O—, —C(Rₐ)═C(R_{b})—, —C(Rₐ)═N—, —C(═NRₐ)—, —C(═O)—, —C(═S)—, —O—, —Si(Rₐ)₂—, —S(═O)ₓ—, and —N(Rₐ)—;

[0308] wherein:

[0309] x is 0, 1, or 2;

[0310] n is 1, 2, 3, or 4;

[0311] each Rₐ and R_{b} is, independently, H, a protecting group, hydroxyl, C₁-C₁₂ alkyl, substituted C₁-C₁₂ alkyl, C₂-C₁₂ alkenyl, substituted C₂-C₁₂ alkenyl, C₂-C₁₂ alkynyl, substituted C₂-C₁₂ alkynyl, C₅-C₂₀ aryl, substituted C₅-C₂₀ aryl, heterocycle radical, substituted heterocycle radical, heteroaryl, substituted heteroaryl, C₅-C₇ alicyclic radical, substituted C₅-C₇ alicyclic radical, halogen, OJ₁, NJ₁J₂, SJ₁, N₃, COOJ₁, acyl (C(═O)—H), substituted acyl, CN, sulfonyl (S(═O)₂-J₁), or sulfoxyl (S(═O)-J₁); and each J₁ and J₂ is, independently, H, C₁-C₁₂ alkyl, substituted C₁-C₁₂ alkyl, C₂-C₁₂ alkenyl, substituted C₂-C₁₂ alkenyl, C₂-C₁₂ alkynyl, substituted C₂-C₁₂ alkynyl, C₅-C₂₀ aryl, substituted C₅-C₂₀ aryl, acyl (C(═O)—H), substituted acyl, a heterocycle radical, a substituted heterocycle radical, C₁-C₁₂ aminoalkyl, substituted C₁-C₁₂ aminoalkyl, or a protecting group.

[0312] Additional bicyclic sugar moieties are known in the art, see, for example: Freier et al., Nucleic Acids Research, 1997, 25(22), 4429-4443, Albaek et al., J. Org. Chem., 2006, 71, 7731-7740, Singh et al., Chem. Commun., 1998, 4, 455-456; Koshkin et al., Tetrahedron, 1998, 54, 3607-3630; Wahlestedt et al., Proc. Natl. Acad. Sci. U S. A., 2000, 97, 5633-5638; Kumar et al., Bioorg. Med. Chem. Lett., 1998, 8, 2219-2222; Singh et al., J. Org. Chem., 1998, 63, 10035-10039; Srivastava et al., J. Am. Chem. Soc., 2007, 129, 8362-8379; Elayadi et al., Curr. Opinion Invens. Drugs, 2001, 2, 558-561; Braasch et al., Chem. Biol., 2001, 8, 1-7; Orum et al., Curr. Opinion Mol. Ther., 2001, 3, 239-243; Wengel et al., U.S. Pat. No. 7,053,207, Imanishi et al., U.S. 6,268,490, Imanishi et al. U.S. Pat. No. 6,770,748, Imanishi et al., U.S. Pat. No. RE44,779; Wengel et al., U.S. Pat. No. 6,794,499, Wengel et al., U.S. Pat. No. 6,670,461; Wengel et al., U.S. Pat. No. 7,034,133, Wengel et al., U.S. Pat. No. 8,080,644; Wengel et al., U.S. Pat. No. 8,034,909; Wengel et al., U.S. Pat. No. 8,153,365; Wengel et al., U.S. Pat. No. 7,572,582; and Ramasamy et al., U.S. Pat. No. 6,525,191, Torsten et al., WO 2004/106356, Wengel et al., WO 1999/014226; Seth et al., WO 2007/134181; Seth et al., U.S. Pat. No. 7,547,684; Seth et al., U.S. Pat. No. 7,666,854; Seth et al., U.S. Pat. No. 8,088,746; Seth et al., U.S. Pat. No. 7,750,131; Seth et al., U.S. Pat. No. 8,030,467; Seth et al., U.S. Pat. No. 8,268,980; Seth et al., U.S. Pat. No. 8,546,556; Seth et al., U.S. Pat. No. 8,530,640; Migawa et al., U.S. Pat. No. 9,012,421; Seth et al., U.S. Pat. No. 8,501,805; Allerson et al., US2008/0039618; and Migawa et al., US2015/0191727.

[0313] In certain embodiments, bicyclic sugar moieties and nucleosides incorporating such bicyclic sugar moieties are further defined by isomeric configuration. For example, an LNA nucleoside (described herein) may be in the α-L configuration or in the 13-D configuration.

[chemical structure]

α-L-methyleneoxy (4′-CH₂—O-2′) or α-L-LNA bicyclic nucleosides have been incorporated into oligonucleotides that showed antisense activity (Frieden et al., Nucleic Acids Research, 2003, 21, 6365-6372). Herein, general descriptions of bicyclic nucleosides include both isomeric configurations. When the positions of specific bicyclic nucleosides (e.g., LNA or cEt) are identified in exemplified embodiments herein, they are in the β-D configuration, unless otherwise specified.

[0314] In certain embodiments, modified sugar moieties comprise one or more non-bridging sugar substituent and one or more bridging sugar substituent (e.g., 5′-substituted and 4′-2′ bridged sugars).

[0315] In certain embodiments, modified sugar moieties are sugar surrogates. In certain such embodiments, the oxygen atom of the sugar moiety is replaced, e.g., with a sulfur, carbon or nitrogen atom. In certain such embodiments, such modified sugar moieties also comprise bridging and/or non-bridging substituents as described herein. For example, certain sugar surrogates comprise a 4′-sulfur atom and a substitution at the 2′-position (see, e.g., Bhat et al., U.S. Pat. No. 7,875,733 and Bhat et al., U.S. Pat. No. 7,939,677) and/or the 5′ position.

[0316] In certain embodiments, sugar surrogates comprise rings having other than 5 atoms. For example, in certain embodiments, a sugar surrogate comprises a six-membered tetrahydropyran (“THP”). Such tetrahydropyrans may be further modified or substituted. Nucleosides comprising such modified tetrahydropyrans include but are not limited to hexitol nucleic acid (“HNA”), anitol nucleic acid (“ANA”), manitol nucleic acid (“MNA”) (see e.g., Leumann, CJ. Bioorg. & Med. Chem. 2002, 10, 841-854), fluoro HNA:

[chemical structure]

(“F-HNA”, see e.g., Swayze et al., U.S. Pat. No. 8,088,904; Swayze et al., U.S. Pat. No. 8,440,803; and Swayze et al., U.S. 9,005,906, F-HNA can also be referred to as a F-THP or 3′-fluoro tetrahydropyran), and nucleosides comprising additional modified THP compounds having the formula:

[chemical structure]

wherein, independently, for each of said modified THP nucleoside:

[0317] Bx is a nucleobase moiety;

[0318] T₃ and T₄ are each, independently, an internucleoside linking group linking the modified THP nucleoside to the remainder of an oligonucleotide or one of T₃ and T₄ is an internucleoside linking group linking the modified THP nucleoside to the remainder of an oligonucleotide and the other of T₃ and T₄ is H, a hydroxyl protecting group, a linked conjugate group, or a 5′ or 3′-terminal group; q₁, q₂, q₃, q₄, q₅, q₆ and q₇ are each, independently, H, C₁-C₆ alkyl, substituted C₁-C₆ alkyl, C₂-C₆ alkenyl, substituted C₂-C₆ alkenyl, C₂-C₆ alkynyl, or substituted C₂-C₆ alkynyl; and each of R₁ and R₂ is independently selected from among: hydrogen, halogen, substituted or unsubstituted alkoxy, NJ₁J₂, SJ₁, N₃, OC(═X)J₁, OC(═X)NJ₁J₂, NJ₃C(═X)NJ₁J₂, and CN, wherein X is O, S or NJ₁, and each J₁, J₂, and J₃ is, independently, H or C₁-C₆ alkyl.

[0319] In certain embodiments, modified THP nucleosides are provided wherein q₁, q₂, q₃, q₄, q₅, q₆ and q₇ are each H. In certain embodiments, at least one of q₁, q₂, q₃, q₄, q₅ q₆ and q₇ is other than H. In certain embodiments, at least one of q₁, q₂, q₃, q₄, q₅, q₆ and q₇ is methyl. In certain embodiments, modified THP nucleosides are provided wherein one of R₁ and R₂ is F. In certain embodiments, R₁ is F and R₂ is H, in certain embodiments, R₁ is methoxy and R₂ is H, and in certain embodiments, R₁ is methoxyethoxy and R₂ is H.

[0320] In certain embodiments, sugar surrogates comprise rings having more than 5 atoms and more than one heteroatom. For example, nucleosides comprising morpholino sugar moieties and their use in oligonucleotides have been reported (see, e.g., Braasch et al., Biochemistry, 2002, 41, 4503-4510 and Summerton et al., U.S. Pat. No. 5,698,685; Summerton et al., U.S. Pat. No. 5,166,315; Summerton et al., U.S. Pat. No. 5,185,444; and Summerton et al., U.S. Pat. No. 5,034,506). As used here, the term “morpholino” means a sugar surrogate having the following structure:

[chemical structure]

In certain embodiments, morpholinos may be modified, for example by adding or altering various substituent groups from the above morpholino structure. Such sugar surrogates are referred to herein as “modified morpholinos.”

[0321] In certain embodiments, sugar surrogates comprise acyclic moieties. Examples of nucleosides and oligonucleotides comprising such acyclic sugar surrogates include but are not limited to: peptide nucleic acid (“PNA”), acyclic butyl nucleic acid (see, e.g., Kumar et al., Org. Biomol. Chem., 2013, 11, 5853-5865), and nucleosides and oligonucleotides described in Manoharan et al., US2013/130378.

[0322] Many other bicyclic and tricyclic sugar and sugar surrogate ring systems are known in the art that can be used in modified nucleosides.

[0323] 2. Modified Nucleobases

[0324] Nucleobase (or base) modifications or substitutions are structurally distinguishable from, yet functionally interchangeable with, naturally occurring or synthetic unmodified nucleobases. Both natural and modified nucleobases are capable of participating in hydrogen bonding. Such nucleobase modifications can impart nuclease stability, binding affinity or some other beneficial biological property to antisense compounds.

[0325] In certain embodiments, compounds described herein comprise modified oligonucleotides. In certain embodiments, modified oligonucleotides comprise one or more nucleoside comprising an unmodified nucleobase. In certain embodiments, modified oligonucleotides comprise one or more nucleoside comprising a modified nucleobase. In certain embodiments, modified oligonucleotides comprise one or more nucleoside that does not comprise a nucleobase, referred to as an abasic nucleoside.

[0326] In certain embodiments, modified nucleobases are selected from: 5-substituted pyrimidines, 6-azapyrimi-dines, alkyl or alkynyl substituted pyrimidines, alkyl substituted purines, and N-2, N-6 and O-6 substituted purines. In certain embodiments, modified nucleobases are selected from: 2-aminopropyladenine, 5-hydroxymethyl cytosine, 5-methylcytosine, xanthine, hypoxanthine, 2-aminoadenine, 6-N-methylguanine, 6-N-methyladenine, 2-propyladenine, 2-thiouracil, 2-thiothymine and 2-thiocytosine, 5-propynyl (C≡C—CH₃) uracil, 5-propynylcytosine, 6-azouracil, 6-azocytosine, 6-azothymine, 5-ribosyluracil (pseudouracil), 4-thiouracil, 8-halo, 8-amino, 8-thiol, 8-thioalkyl, 8-hydroxyl, 8-aza and other 8-substituted purines, 5-halo, particularly 5-bromo, 5-trifluoromethyl, 5-halouracil, and 5-halocytosine, 7-methylguanine, 7-methyladenine, 2-F-adenine, 2-aminoadenine, 7-deazaguanine, 7-deazaadenine, 3-deazaguanine, 3-deazaadenine, 6-N-benzoyladenine, 2-N-isobutyrylguanine, 4-N-benzoylcytosine, 4-N-benzoyluracil, 5-methyl 4-N-benzoylcytosine, 5-methyl 4-N-benzoyluracil, universal bases, hydrophobic bases, promiscuous bases, size-expanded bases, and fluorinated bases. Further modified nucleobases include tricyclic pyrimidines, such as 1,3-diazaphenoxazine-2-one, 1,3-diazaphenothiazine-2-one and 9-(2-aminoethoxy)-1,3-diazaphenoxazine-2-one (G-clamp). Modified nucleobases may also include those in which the purine or pyrimidine base is replaced with other heterocycles, for example 7-deaza-adenine, 7-deazaguanosine, 2-aminopyridine and 2-pyridone. Further nucleobases include those disclosed in Merigan et al., U.S. Pat. No. 3,687,808, those disclosed in The Concise Encyclopedia Of Polymer Science And Engineering, Kroschwitz, J. I., Ed., John Wiley & Sons, 1990, 858-859; Englisch et al., Angewandte Chemie, International Edition, 1991, 30, 613; Sanghvi, Y. S., Chapter 15, Antisense Research and Applications, Crooke, S. T. and Lebleu, B., Eds., CRC Press, 1993, 273-288; and those disclosed in Chapters 6 and 15, Antisense Drug Technology, Crooke S. T., Ed., CRC Press, 2008, 163-166 and 442-443.

[0327] Publications that teach the preparation of certain of the above noted modified nucleobases as well as other modified nucleobases include without limitation, Manoharan et al., US2003/0158403, Manoharan et al., US2003/0175906; Dinh et al., U.S. Pat. No. 4,845,205; Spielvogel et al., U.S. Pat. No. 5,130,302; Rogers et al., U.S. Pat. No. 5,134,066; Bischofberger et al., U.S. Pat. No. 5,175,273; Urdea et al., U.S. Pat. No. 5,367,066; Benner et al., U.S. Pat. No. 5,432,272; Matteucci et al., U.S. Pat. No. 5,434,257; Gmeiner et al., U.S. Pat. No. 5,457,187; Cook et al., U.S. Pat. No. 5,459,255; Froehler et al., U.S. Pat. No. 5,484,908; Matteucci et al., U.S. Pat. No. 5,502,177; Hawkins et al., U.S. Pat. No. 5,525,711; Haralambidis et al., U.S. Pat. No. 5,552,540; Cook et al., U.S. Pat. No. 5,587,469; Froehler et al., U.S. Pat. No. 5,594,121; Switzer et al., U.S. Pat. No. 5,596,091; Cook et al., U.S. Pat. No. 5,614,617; Froehler et al., U.S. Pat. No. 5,645,985; Cook et al., U.S. Pat. No. 5,681,941; Cook et al., U.S. Pat. No. 5,811,534; Cook et al., U.S. Pat. No. 5,750,692; Cook et al., U.S. Pat. No. 5,948,903; Cook et al., U.S. Pat. No. 5,587,470; Cook et al., U.S. Pat. No. 5,457,191; Matteucci et al., U.S. Pat. No. 5,763,588; Froehler et al., U.S. Pat. No. 5,830,653; Cook et al., U.S. Pat. No. 5,808,027; Cook et al., U.S. Pat. No. 6,166,199; and Matteucci et al., U.S. Pat. No. 6,005,096.

[0328] In certain embodiments, compounds targeted to a FOXP3 nucleic acid comprise one or more modified nucleobases. In certain embodiments, the modified nucleobase is 5-methylcytosine. In certain embodiments, each cytosine is a 5-methylcytosine.

[0329] 3. Modified Internucleoside Linkages

[0330] The naturally occurring internucleoside linkage of RNA and DNA is a 3′ to 5′ phosphodiester linkage ln certain embodiments, compounds described herein having one or more modified, i.e. non-naturally occurring, internucleoside linkages are often selected over compounds having naturally occurring internucleoside linkages because of desirable properties such as, for example, enhanced cellular uptake, enhanced affinity for target nucleic acids, and increased stability in the presence of nucleases.

[0331] Representative internucleoside linkages having a chiral center include but are not limited to alkylphosphonates and phosphorothioates. Modified oligonucleotides comprising internucleoside linkages having a chiral center can be prepared as populations of modified oligonucleotides comprising stereorandom internucleoside linkages, or as populations of modified oligonucleotides comprising phosphorothioate linkages in particular stereochemical configurations. In certain embodiments, populations of modified oligonucleotides comprise phosphorothioate internucleoside linkages wherein all of the phosphorothioate internucleoside linkages are stereorandom. Such modified oligonucleotides can be generated using synthetic methods that result in random selection of the stereochemical configuration of each phosphorothioate linkage. Nonetheless, as is well understood by those of skill in the art, each individual phosphorothioate of each individual oligonucleotide molecule has a defined stereoconfiguration. In certain embodiments, populations of modified oligonucleotides are enriched for modified oligonucleotides comprising one or more particular phosphorothioate internucleoside linkages in a particular, independently selected stereochemical configuration. In certain embodiments, the particular configuration of the particular phosphorothioate linkage is present in at least 65% of the molecules in the population. In certain embodiments, the particular configuration of the particular phosphorothioate linkage is present in at least 70% of the molecules in the population. In certain embodiments, the particular configuration of the particular phosphorothioate linkage is present in at least 80% of the molecules in the population. In certain embodiments, the particular configuration of the particular phosphorothioate linkage is present in at least 90% of the molecules in the population. In certain embodiments, the particular configuration of the particular phosphorothioate linkage is present in at least 99% of the molecules in the population. Such chirally enriched populations of modified oligonucleotides can be generated using synthetic methods known in the art, e.g., methods described in Oka et al., JACS 125, 8307 (2003), Wan et al. Nuc. Acid. Res. 42, 13456 (2014), and WO 2017/015555. In certain embodiments, a population of modified oligonucleotides is enriched for modified oligonucleotides having at least one indicated phosphorothioate in the (Sp) configuration. In certain embodiments, a population of modified oligonucleotides is enriched for modified oligonucleotides having at least one phosphorothioate in the (Rp) configuration. In certain embodiments, modified oligonucleotides comprising (Rp) and/or (Sp) phosphorothioates comprise one or more of the following formulas, respectively, wherein “B” indicates a nucleobase:

[chemical structure]

Unless otherwise indicated, chiral internucleoside linkages of modified oligonucleotides described herein can be stereorandom or in a particular stereochemical configuration.

[0332] In certain embodiments, compounds targeted to an FOXP3 nucleic acid comprise one or more modified internucleoside linkages. In certain embodiments, the modified internucleoside linkages are phosphorothioate linkages. In certain embodiments, each internucleoside linkage of an antisense compound is a phosphorothioate internucleoside linkage.

[0333] In certain embodiments, compounds described herein comprise oligonucleotides. Oligonucleotides having modified internucleoside linkages include internucleoside linkages that retain a phosphorus atom as well as internucleoside linkages that do not have a phosphorus atom. Representative phosphorus containing internucleoside linkages include, but are not limited to, phosphodiesters, phosphotriesters, methylphosphonates, phosphoramidate, and phosphorothioates. Methods of preparation of phosphorous-containing and non-phosphorous-containing linkages are well known.

[0334] In certain embodiments, nucleosides of modified oligonucleotides may be linked together using any internucleoside linkage. The two main classes of internucleoside linking groups are defined by the presence or absence of a phosphorus atom. Representative phosphorus-containing internucleoside linkages include but are not limited to phosphates, which contain a phosphodiester bond (“P═O”) (also referred to as unmodified or naturally occurring linkages), phosphotriesters, methylphosphonates, phosphoramidates, and phosphorothioates (“P═S”), and phosphorodithioates (“HS-P═S”). Representative non-phosphorus containing internucleoside linking groups include but are not limited to methylenemethylimino (—CH₂—N(CH₃)—O—CH₂—), thiodiester, thionocarbamate (—O—C(═O)(NH)—S—); siloxane (—O—SiH2-O—); and N,N′-dimethylhydrazine (—CH₂—N(CH₃)—N(CH₃)—). Modified internucleoside linkages, compared to naturally occurring phosphate linkages, can be used to alter, typically increase, nuclease resistance of the oligonucleotide. In certain embodiments, internucleoside linkages having a chiral atom can be prepared as a racemic mixture, or as separate enantiomers. Representative chiral internucleoside linkages include but are not limited to alkylphosphonates and phosphorothioates. Methods of preparation of phosphorous-containing and non-phosphorous-containing internucleoside linkages are well known to those skilled in the art.

[0335] Neutral internucleoside linkages include, without limitation, phosphotriesters, methylphosphonates, MMI (3′-CH₂—N(CH₃)—O-5), amide-3 (3′-CH₂—C(═O)—N(H)-5′), amide-4 (3′-CH₂—N(H)—C(═O)-5′), formacetal (3′-O—CH₂—O-5′), methoxypropyl, and thioformacetal (3′-S—CH₂—O-5′). Further neutral internucleoside linkages include nonionic linkages comprising siloxane (dialkylsiloxane), carboxylate ester, carboxamide, sulfide, sulfonate ester and amides (See for example: Carbohydrate Modifications in Antisense Research; Y. S. Sanghvi and P. D. Cook, Eds., ACS Symposium Series 580; Chapters 3 and 4, 40-65). Further neutral internucleoside linkages include nonionic linkages comprising mixed N, O, S and CH₂ component parts.

[0336] In certain embodiments, oligonucleotides comprise modified internucleoside linkages arranged along the oligonucleotide or region thereof in a defined pattern or modified internucleoside linkage motif. In certain embodiments, internucleoside linkages are arranged in a gapped motif. In such embodiments, the internucleoside linkages in each of two wing regions are different from the internucleoside linkages in the gap region. In certain embodiments the internucleoside linkages in the wings are phosphodiester and the internucleoside linkages in the gap are phosphorothioate. The nucleoside motif is independently selected, so such oligonucleotides having a gapped internucleoside linkage motif may or may not have a gapped nucleoside motif and if it does have a gapped nucleoside motif, the wing and gap lengths may or may not be the same.

[0337] In certain embodiments, oligonucleotides comprise a region having an alternating internucleoside linkage motif. In certain embodiments, oligonucleotides comprise a region of uniformly modified internucleoside linkages. In certain such embodiments, the oligonucleotide comprises a region that is uniformly linked by phosphorothioate internucleoside linkages. In certain embodiments, the oligonucleotide is uniformly linked by phosphorothioate. In certain embodiments, each internucleoside linkage of the oligonucleotide is selected from phosphodiester and phosphorothioate. In certain embodiments, each internucleoside linkage of the oligonucleotide is selected from phosphodiester and phosphorothioate and at least one internucleoside linkage is phosphorothioate.

[0338] In certain embodiments, the oligonucleotide comprises at least 6 phosphorothioate internucleoside linkages. In certain embodiments, the oligonucleotide comprises at least 8 phosphorothioate internucleoside linkages. In certain embodiments, the oligonucleotide comprises at least 10 phosphorothioate internucleoside linkages. In certain embodiments, the oligonucleotide comprises at least one block of at least 6 consecutive phosphorothioate internucleoside linkages. In certain embodiments, the oligonucleotide comprises at least one block of at least 8 consecutive phosphorothioate internucleoside linkages. In certain embodiments, the oligonucleotide comprises at least one block of at least 10 consecutive phosphorothioate internucleoside linkages. In certain embodiments, the oligonucleotide comprises at least block of at least one 12 consecutive phosphorothioate internucleoside linkages. In certain such embodiments, at least one such block is located at the 3′ end of the oligonucleotide. In certain such embodiments, at least one such block is located within 3 nucleosides of the 3′ end of the oligonucleotide.

[0339] In certain embodiments, oligonucleotides comprise one or more methylphosponate linkages. In certain embodiments, oligonucleotides having a gapmer nucleoside motif comprise a linkage motif comprising all phosphorothioate linkages except for one or two methylphosponate linkages. In certain embodiments, one methylphosponate linkage is in the central gap of an oligonucleotide having a gapmer nucleoside motif.

[0340] In certain embodiments, it is desirable to arrange the number of phosphorothioate internucleoside linkages and phosphodiester internucleoside linkages to maintain nuclease resistance. In certain embodiments, it is desirable to arrange the number and position of phosphorothioate internucleoside linkages and the number and position of phosphodiester internucleoside linkages to maintain nuclease resistance. In certain embodiments, the number of phosphorothioate internucleoside linkages may be decreased and the number of phosphodiester internucleoside linkages may be increased. In certain embodiments, the number of phosphorothioate internucleoside linkages may be decreased and the number of phosphodiester internucleoside linkages may be increased while still maintaining nuclease resistance. In certain embodiments it is desirable to decrease the number of phosphorothioate internucleoside linkages while retaining nuclease resistance. In certain embodiments it is desirable to increase the number of phosphodiester internucleoside linkages while retaining nuclease resistance.

### Certain Motifs

[0341] In certain embodiments, compounds described herein comprise oligonucleotides. Oligonucleotides can have a motif, e.g. a pattern of unmodified and/or modified sugar moieties, nucleobases, and/or internucleoside linkages. In certain embodiments, modified oligonucleotides comprise one or more modified nucleoside comprising a modified sugar. In certain embodiments, modified oligonucleotides comprise one or more modified nucleosides comprising a modified nucleobase. In certain embodiments, modified oligonucleotides comprise one or more modified internucleoside linkage. In such embodiments, the modified, unmodified, and differently modified sugar moieties, nucleobases, and/or internucleoside linkages of a modified oligonucleotide define a pattern or motif. In certain embodiments, the patterns of sugar moieties, nucleobases, and internucleoside linkages are each independent of one another. Thus, a modified oligonucleotide may be described by its sugar motif, nucleobase motif and/or internucleoside linkage motif (as used herein, nucleobase motif describes the modifications to the nucleobases independent of the sequence of nucleobases).

[0342] a. Certain Sugar Motifs

[0343] In certain embodiments, compounds described herein comprise oligonucleotides. In certain embodiments, oligonucleotides comprise one or more type of modified sugar and/or unmodified sugar moiety arranged along the oligonucleotide or region thereof in a defined pattern or sugar motif. In certain instances, such sugar motifs include but are not limited to any of the sugar modifications discussed herein.

[0344] In certain embodiments, modified oligonucleotides comprise or consist of a region having a gapmer motif, which comprises two external regions or “wings” and a central or internal region or “gap.” The three regions of a gapmer motif (the 5′-wing, the gap, and the 3′-wing) form a contiguous sequence of nucleosides wherein at least some of the sugar moieties of the nucleosides of each of the wings differ from at least some of the sugar moieties of the nucleosides of the gap. Specifically, at least the sugar moieties of the nucleosides of each wing that are closest to the gap (the 3′-most nucleoside of the 5′-wing and the 5′-most nucleoside of the 3′-wing) differ from the sugar moiety of the neighboring gap nucleosides, thus defining the boundary between the wings and the gap (i.e., the wing/gap junction). In certain embodiments, the sugar moieties within the gap are the same as one another. In certain embodiments, the gap includes one or more nucleoside having a sugar moiety that differs from the sugar moiety of one or more other nucleosides of the gap. In certain embodiments, the sugar motifs of the two wings are the same as one another (symmetric gapmer). In certain embodiments, the sugar motif of the 5′-wing differs from the sugar motif of the 3′-wing (asymmetric gapmer).

[0345] In certain embodiments, the wings of a gapmer comprise 1-5 nucleosides. In certain embodiments, the wings of a gapmer comprise 2-5 nucleosides. In certain embodiments, the wings of a gapmer comprise 3-5 nucleosides. In certain embodiments, the nucleosides of a gapmer are all modified nucleosides.

[0346] In certain embodiments, the gap of a gapmer comprises 7-12 nucleosides. In certain embodiments, the gap of a gapmer comprises 7-10 nucleosides. In certain embodiments, the gap of a gapmer comprises 8-10 nucleosides. In certain embodiments, the gap of a gapmer comprises 10 nucleosides. In certain embodiment, each nucleoside of the gap of a gapmer is an unmodified 2′-deoxy nucleoside.

[0347] In certain embodiments, the gapmer is a deoxy gapmer. In such embodiments, the nucleosides on the gap side of each wing/gap junction are unmodified 2′-deoxy nucleosides and the nucleosides on the wing sides of each wing/gap junction are modified nucleosides. In certain such embodiments, each nucleoside of the gap is an unmodified 2′-deoxy nucleoside. In certain such embodiments, each nucleoside of each wing is a modified nucleoside.

[0348] In certain embodiments, a modified oligonucleotide has a fully modified sugar motif wherein each nucleoside of the modified oligonucleotide comprises a modified sugar moiety. In certain embodiments, modified oligonucleotides comprise or consist of a region having a fully modified sugar motif wherein each nucleoside of the region comprises a modified sugar moiety. In certain embodiments, modified oligonucleotides comprise or consist of a region having a fully modified sugar motif, wherein each nucleoside within the fully modified region comprises the same modified sugar moiety, referred to herein as a uniformly modified sugar motif. In certain embodiments, a fully modified oligonucleotide is a uniformly modified oligonucleotide. In certain embodiments, each nucleoside of a uniformly modified comprises the same 2′-modification.

[0349] In certain embodiments, a modified oligonucleotide can comprise a sugar motif described in Swayze et al., US2010/0197762; Freier et al., US2014/0107330; Freier et al., US2015/0184153; and Seth et al., US2015/0267195, each of which is incorporated by reference in its entirety herein.

[0350] Certain embodiments provided herein are directed to modified oligomeric compounds useful for inhibiting target nucleic acid expression, which can be useful for treating, preventing, ameliorating, or slowing progression of a disease associated with such a target nucleic acid. In certain embodiments, the modified oligomeric compounds comprise antisense oligonucleotides that are gapmers having certain sugar motifs. In certain embodiments, the gapmer sugar motifs provided herein can be combined with any nucleobase sequence and any internucleoside linkage motif to form potent antisense oligonucleotides.

[0351] In certain embodiments, a method comprises contacting a cell or administering to a subject a compound comprising a modified oligonucleotide 16 linked nucleosides in length having the motif: ekk-d9-kkee, wherein represents a 2′-deoxyribose sugar, 1′ represents a cEt nucleoside, and ‘e’ represents a 2′-MOE nucleoside.

[0352] In certain embodiments, the cell is a cancer cell. In certain embodiments, the subject has cancer. In certain embodiments, administering the compound to the subject treats the subject's cancer.

[0353] In certain embodiments, a method comprises contacting a cell or administering to a subject a compound comprising a modified oligonucleotide 16 linked nucleosides in length having the motif: k-d9-kekeke, wherein represents a 2′-deoxyribose sugar, 1′ represents a cEt nucleoside, and ‘e’ represents a 2′-MOE nucleoside.

[0354] In certain embodiments, the cell is a cancer cell. In certain embodiments, the subject has cancer. In certain embodiments, administering the compound to the subject treats the subject's cancer.

[0355] In certain embodiments, a method comprises contacting a cell or administering to a subject a compound comprising a modified oligonucleotide 16 linked nucleosides in length having the motif: kkk-d8-kekek, wherein represents a 2′-deoxyribose sugar, 1′ represents a cEt nucleoside, and ‘e’ represents a 2′-MOE nucleoside. In certain embodiments, the cell is a cancer cell. In certain embodiments, the subject has cancer. In certain embodiments, administering the compound to the subject treats the subject's cancer.

[0356] In certain embodiments, a method comprises contacting a cell or administering to a subject a compound comprising a modified oligonucleotide 16 linked nucleosides in length having the motif: kkk-d9-keke, wherein represents a 2′-deoxyribose sugar, 1′ represents a cEt nucleoside, and ‘e’ represents a 2′-MOE nucleoside.

[0357] In certain embodiments, the cell is a cancer cell. In certain embodiments, the subject has cancer. In certain embodiments, administering the compound to the subject treats the subject's cancer.

[0358] In certain embodiments, a method comprises contacting a cell or administering to a subject a compound comprising a modified oligonucleotide 16 linked nucleosides in length having the motif: kk-d9-kdkdk, wherein represents a 2′-deoxyribose sugar, 1′ represents a cEt nucleoside, and ‘e’ represents a 2′-MOE nucleoside.

[0359] In certain embodiments, the cell is a cancer cell. In certain embodiments, the subject has cancer. In certain embodiments, administering the compound to the subject treats the subject's cancer.

[0360] In certain embodiments, a compound comprises a modified oligonucleotide 16 linked nucleosides in length having the motif: kk-d9-eeekk, wherein represents a 2′-deoxyribose sugar, ‘k’ represents a cEt nucleoside, and ‘e’ represents a 2′-MOE nucleoside. In certain embodiments, a method comprises contacting a cell or administering to a subject a compound comprising a modified oligonucleotide 16 linked nucleosides in length having the motif: kk-d9-eeekk, wherein represents a 2′-deoxyribose sugar, 1′ represents a cEt nucleoside, and ‘e’ represents a 2′-MOE nucleoside. In certain embodiments, the cell is a cancer cell. In certain embodiments, the subject has cancer. In certain embodiments, administering the compound to the subject treats the subject's cancer.

[0361] In certain embodiments, a method comprises contacting a cell or administering to a subject a compound comprising a modified oligonucleotide 16 linked nucleosides in length having the motif: kk-d9-ekeke, wherein represents a 2′-deoxyribose sugar, 1′ represents a cEt nucleoside, and ‘e’ represents a 2′-MOE nucleoside. In certain embodiments, the cell is a cancer cell. In certain embodiments, the subject has cancer. In certain embodiments, administering the compound to the subject treats the subject's cancer.

[0362] b. Certain Nucleobase Motifs

[0363] In certain embodiments, compounds described herein comprise oligonucleotides. In certain embodiments, oligonucleotides comprise modified and/or unmodified nucleobases arranged along the oligonucleotide or region thereof in a defined pattern or motif. In certain embodiments, each nucleobase is modified. In certain embodiments, none of the nucleobases are modified. In certain embodiments, each purine or each pyrimidine is modified. In certain embodiments, each adenine is modified. In certain embodiments, each guanine is modified. In certain embodiments, each thymine is modified. In certain embodiments, each uracil is modified. In certain embodiments, each cytosine is modified. In certain embodiments, some or all of the cytosine nucleobases in a modified oligonucleotide are 5-methylcytosines.

[0364] In certain embodiments, modified oligonucleotides comprise a block of modified nucleobases. In certain such embodiments, the block is at the 3′-end of the oligonucleotide. In certain embodiments the block is within 3 nucleosides of the 3′-end of the oligonucleotide. In certain embodiments, the block is at the 5′-end of the oligonucleotide. In certain embodiments the block is within 3 nucleosides of the 5′-end of the oligonucleotide.

[0365] In certain embodiments, oligonucleotides having a gapmer motif comprise a nucleoside comprising a modified nucleobase. In certain such embodiments, one nucleoside comprising a modified nucleobase is in the central gap of an oligonucleotide having a gapmer motif. In certain such embodiments, the sugar moiety of said nucleoside is a 2′-deoxyribosyl moiety. In certain embodiments, the modified nucleobase is selected from: a 2-thiopyrimidine and a 5-propynepyrimidine.

[0366] c. Certain Internucleoside Linkage Motifs

[0367] In certain embodiments, compounds described herein comprise oligonucleotides. In certain embodiments, oligonucleotides comprise modified and/or unmodified internucleoside linkages arranged along the oligonucleotide or region thereof in a defined pattern or motif. In certain embodiments, essentially each internucleoside linking group is a phosphate internucleoside linkage (P═O). In certain embodiments, each internucleoside linking group of a modified oligonucleotide is a phosphorothioate (P═S). In certain embodiments, each internucleoside linking group of a modified oligonucleotide is independently selected from a phosphorothioate and phosphate internucleoside linkage. In certain embodiments, the sugar motif of a modified oligonucleotide is a gapmer and the internucleoside linkages within the gap are all modified. In certain such embodiments, some or all of the internucleoside linkages in the wings are unmodified phosphate linkages. In certain embodiments, the terminal internucleoside linkages are modified.

[0368] 4. Certain Modified Oligonucleotides

[0369] In certain embodiments, compounds described herein comprise modified oligonucleotides. In certain embodiments, the above modifications (sugar, nucleobase, internucleoside linkage) are incorporated into a modified oligonucleotide. In certain embodiments, modified oligonucleotides are characterized by their modification, motifs, and overall lengths. In certain embodiments, such parameters are each independent of one another. Thus, unless otherwise indicated, each internucleoside linkage of an oligonucleotide having a gapmer sugar motif may be modified or unmodified and may or may not follow the gapmer modification pattern of the sugar modifications. For example, the internucleoside linkages within the wing regions of a sugar gapmer may be the same or different from one another and may be the same or different from the internucleoside linkages of the gap region of the sugar motif. Likewise, such gapmer oligonucleotides may comprise one or more modified nucleobase independent of the gapmer pattern of the sugar modifications. Furthermore, in certain instances, an oligonucleotide is described by an overall length or range and by lengths or length ranges of two or more regions (e.g., a regions of nucleosides having specified sugar modifications), in such circumstances it may be possible to select numbers for each range that result in an oligonucleotide having an overall length falling outside the specified range. In such circumstances, both elements must be satisfied. For example, in certain embodiments, a modified oligonucleotide consists of 15-20 linked nucleosides and has a sugar motif consisting of three regions, A, B, and C, wherein region A consists of 2-6 linked nucleosides having a specified sugar motif, region B consists of 6-10 linked nucleosides having a specified sugar motif, and region C consists of 2-6 linked nucleosides having a specified sugar motif. Such embodiments do not include modified oligonucleotides where A and C each consist of 6 linked nucleosides and B consists of 10 linked nucleosides (even though those numbers of nucleosides are permitted within the requirements for A, B, and C) because the overall length of such oligonucleotide is 22, which exceeds the upper limit of the overall length of the modified oligonucleotide (20). Herein, if a description of an oligonucleotide is silent with respect to one or more parameter, such parameter is not limited. Thus, a modified oligonucleotide described only as having a gapmer sugar motif without further description may have any length, internucleoside linkage motif, and nucleobase motif. Unless otherwise indicated, all modifications are independent of nucleobase sequence.

### Certain Conjugated Compounds

[0370] In certain embodiments, the compounds described herein comprise or consist of an oligonucleotide (modified or unmodified) and optionally one or more conjugate groups and/or terminal groups. Conjugate groups consist of one or more conjugate moiety and a conjugate linker which links the conjugate moiety to the oligonucleotide. Conjugate groups may be attached to either or both ends of an oligonucleotide and/or at any internal position. In certain embodiments, conjugate groups are attached to the 2′-position of a nucleoside of a modified oligonucleotide. In certain embodiments, conjugate groups that are attached to either or both ends of an oligonucleotide are terminal groups. In certain such embodiments, conjugate groups or terminal groups are attached at the 3′ and/or 5′-end of oligonucleotides. In certain such embodiments, conjugate groups (or terminal groups) are attached at the 3′-end of oligonucleotides. In certain embodiments, conjugate groups are attached near the 3′-end of oligonucleotides. In certain embodiments, conjugate groups (or terminal groups) are attached at the 5′-end of oligonucleotides. In certain embodiments, conjugate groups are attached near the 5′-end of oligonucleotides.

[0371] In certain embodiments, the oligonucleotide is modified. In certain embodiments, the oligonucleotide of a compound has a nucleobase sequence that is complementary to a target nucleic acid. In certain embodiments, oligonucleotides are complementary to a messenger RNA (mRNA). In certain embodiments, oligonucleotides are complementary to a sense transcript.

[0372] Examples of terminal groups include but are not limited to conjugate groups, capping groups, phosphate moieties, protecting groups, modified or unmodified nucleosides, and two or more nucleosides that are independently modified or unmodified.

[0373] A. Certain Conjugate Groups

[0374] In certain embodiments, oligonucleotides are covalently attached to one or more conjugate groups. In certain embodiments, conjugate groups modify one or more properties of the attached oligonucleotide, including but not limited to pharmacodynamics, pharmacokinetics, stability, binding, absorption, tissue distribution, cellular distribution, cellular uptake, charge and clearance In certain embodiments, conjugate groups impart a new property on the attached oligonucleotide, e.g., fluorophores or reporter groups that enable detection of the oligonucleotide.

[0375] Certain conjugate groups and conjugate moieties have been described previously, for example: cholesterol moiety (Letsinger et al., Proc. Natl. Acad. Sci. USA, 1989, 86, 6553-6556), cholic acid (Manoharan et al., Bioorg. Med. Chem. Lett., 1994, 4, 1053-1060), a thioether, e.g., hexyl-S-tritylthiol (Manoharan et al., Ann. N.Y. Acad. Sci., 1992, 660, 306-309; Manoharan et al., Bioorg. Med. Chem. Lett., 1993, 3, 2765-2770), a thiocholesterol (Oberhauser et al., Nucl. Acids Res., 1992, 20, 533-538), an aliphatic chain, e.g., do-decan-diol or undecyl residues (Saison-Behmoaras et al., EMBO J., 1991, 10, 1111-1118; Kabanov et al., FEBS Lett., 1990, 259, 327-330; Svinarchuk et al., Biochimie, 1993, 75, 49-54), a phospholipid, e.g., di-hexadecyl-rac-glycerol or triethyl-ammonium 1,2-di-O-hexadecyl-rac-glycero-3-H-phosphonate (Manoharan et al., Tetrahedron Lett., 1995, 36, 3651-3654; Shea et al., Nucl. Acids Res., 1990, 18, 3777-3783), a polyamine or a polyethylene glycol chain (Manoharan et al., Nucleosides & Nucleotides, 1995, 14, 969-973), or adamantane acetic, a palmityl moiety (Mishra et al., Biochim. Biophys. Acta, 1995, 1264, 229-237), —an octadecylamine or hexylamino-carbonyl-oxycholesterol moiety (Crooke et al., J. Pharmacol. Exp. Ther., 1996, i, 923-937), a tocopherol group (Nishina et al., Molecular Therapy Nucleic Acids, 2015, 4, e220; doi:10.1038/mtna.2014.72 and Nishina et al., Molecular Therapy, 2008, 16, 734-740), or a GalNAc cluster (e.g., WO2014/179620).

[0376] 1. Conjugate Moieties

[0377] Conjugate moieties include, without limitation, intercalators, reporter molecules, polyamines, polyamides, peptides, carbohydrates (e.g., GalNAc), vitamin moieties, polyethylene glycols, thioethers, polyethers, cholesterols, thiocholesterols, cholic acid moieties, folate, lipids, phospholipids, biotin, phenazine, phenanthridine, anthraquinone, adamantane, acridine, fluoresceins, rhodamines, coumarins, fluorophores, and dyes.

[0378] In certain embodiments, a conjugate moiety comprises an active drug substance, for example, aspirin, warfarin, phenylbutazone, ibuprofen, suprofen, fen-bufen, ketoprofen, (S)-(+)-pranoprofen, carprofen, dansylsarcosine, 2,3,5-triiodobenzoic acid, fingolimod, flufenamic acid, folinic acid, a benzothiadiazide, chlorothiazide, a diazepine, indo-methicin, a barbiturate, a cephalosporin, a sulfa drug, an antidiabetic, an antibacterial or an antibiotic.

[0379] 2. Conjugate Linkers

[0380] Conjugate moieties are attached to oligonucleotides through conjugate linkers. In certain compounds, a conjugate group is a single chemical bond (i.e. conjugate moiety is attached to an oligonucleotide via a conjugate linker through a single bond). In certain embodiments, the conjugate linker comprises a chain structure, such as a hydrocarbyl chain, or an oligomer of repeating units such as ethylene glycol, nucleosides, or amino acid units.

[0381] In certain embodiments, a conjugate linker comprises one or more groups selected from alkyl, amino, oxo, amide, disulfide, polyethylene glycol, ether, thioether, and hydroxylamino. In certain such embodiments, the conjugate linker comprises groups selected from alkyl, amino, oxo, amide and ether groups. In certain embodiments, the conjugate linker comprises groups selected from alkyl and amide groups. In certain embodiments, the conjugate linker comprises groups selected from alkyl and ether groups. In certain embodiments, the conjugate linker comprises at least one phosphorus moiety. In certain embodiments, the conjugate linker comprises at least one phosphate group. In certain embodiments, the conjugate linker includes at least one neutral linking group.

[0382] In certain embodiments, conjugate linkers, including the conjugate linkers described above, are bifunctional linking moieties, e.g., those known in the art to be useful for attaching conjugate groups to parent compounds, such as the oligonucleotides provided herein. In general, a bifunctional linking moiety comprises at least two functional groups. One of the functional groups is selected to bind to a particular site on a compound and the other is selected to bind to a conjugate group. Examples of functional groups used in a bifunctional linking moiety include but are not limited to electrophiles for reacting with nucleophilic groups and nucleophiles for reacting with electrophilic groups. In certain embodiments, bifunctional linking moieties comprise one or more groups selected from amino, hydroxyl, carboxylic acid, thiol, alkyl, alkenyl, and alkynyl.

[0383] Examples of conjugate linkers include but are not limited to pyrrolidine, 8-amino-3,6-dioxaoctanoic acid (ADO), succinimidyl 4-(N-maleimidomethyl) cyclohexane-1-carboxylate (SMCC) and 6-aminohexanoic acid (AHEX or AHA). Other conjugate linkers include but are not limited to substituted or unsubstituted C₁-C₁₀ alkyl, substituted or unsubstituted C₂-C₁₀ alkenyl or substituted or unsubstituted C₂-C₁₀ alkynyl, wherein a nonlimiting list of preferred substituent groups includes hydroxyl, amino, alkoxy, carboxy, benzyl, phenyl, nitro, thiol, thioalkoxy, halogen, alkyl, aryl, alkenyl and alkynyl.

[0384] In certain embodiments, conjugate linkers comprise 1-10 linker-nucleosides. In certain embodiments, such linker-nucleosides are modified nucleosides. In certain embodiments such linker-nucleosides comprise a modified sugar moiety. In certain embodiments, linker-nucleosides are unmodified. In certain embodiments, linker-nucleosides comprise an optionally protected heterocyclic base selected from a purine, substituted purine, pyrimidine or substituted pyrimidine. In certain embodiments, a cleavable moiety is a nucleoside selected from uracil, thymine, cytosine, 4-N-benzoylcytosine, 5-methylcytosine, 4-N-benzoyl-5-methylcytosine, adenine, 6-N-benzoyladenine, guanine and 2-N-isobutyrylguanine. It is typically desirable for linker-nucleosides to be cleaved from the compound after it reaches a target tissue. Accordingly, linker-nucleosides are typically linked to one another and to the remainder of the compound through cleavable bonds. In certain embodiments, such cleavable bonds are phosphodiester bonds.

[0385] Herein, linker-nucleosides are not considered to be part of the oligonucleotide. Accordingly, in embodiments in which a compound comprises an oligonucleotide consisting of a specified number or range of linked nucleosides and/or a specified percent complementarity to a reference nucleic acid and the compound also comprises a conjugate group comprising a conjugate linker comprising linker-nucleosides, those linker-nucleosides are not counted toward the length of the oligonucleotide and are not used in determining the percent complementarity of the oligonucleotide for the reference nucleic acid. For example, a compound may comprise (1) a modified oligonucleotide consisting of 8-30 nucleosides and (2) a conjugate group comprising 1-10 linker-nucleosides that are contiguous with the nucleosides of the modified oligonucleotide. The total number of contiguous linked nucleosides in such a compound is more than 30. Alternatively, an compound may comprise a modified oligonucleotide consisting of 8-30 nucleosides and no conjugate group. The total number of contiguous linked nucleosides in such a compound is no more than 30. Unless otherwise indicated conjugate linkers comprise no more than 10 linker-nucleosides. In certain embodiments, conjugate linkers comprise no more than 5 linker-nucleosides. In certain embodiments, conjugate linkers comprise no more than 3 linker-nucleosides. In certain embodiments, conjugate linkers comprise no more than 2 linker-nucleosides. In certain embodiments, conjugate linkers comprise no more than 1 linker-nucleoside.

[0386] In certain embodiments, it is desirable for a conjugate group to be cleaved from the oligonucleotide. For example, in certain circumstances compounds comprising a particular conjugate moiety are better taken up by a particular cell type, but once the compound has been taken up, it is desirable that the conjugate group be cleaved to release the unconjugated or parent oligonucleotide. Thus, certain conjugate may comprise one or more cleavable moieties, typically within the conjugate linker. In certain embodiments, a cleavable moiety is a cleavable bond. In certain embodiments, a cleavable moiety is a group of atoms comprising at least one cleavable bond. In certain embodiments, a cleavable moiety comprises a group of atoms having one, two, three, four, or more than four cleavable bonds. In certain embodiments, a cleavable moiety is selectively cleaved inside a cell or subcellular compartment, such as a lysosome. In certain embodiments, a cleavable moiety is selectively cleaved by endogenous enzymes, such as nucleases.

[0387] In certain embodiments, a cleavable bond is selected from among: an amide, an ester, an ether, one or both esters of a phosphodiester, a phosphate ester, a carbamate, or a disulfide. In certain embodiments, a cleavable bond is one or both of the esters of a phosphodiester. In certain embodiments, a cleavable moiety comprises a phosphate or phosphodiester. In certain embodiments, the cleavable moiety is a phosphate linkage between an oligonucleotide and a conjugate moiety or conjugate group.

[0388] In certain embodiments, a cleavable moiety comprises or consists of one or more linker-nucleosides. In certain such embodiments, one or more linker-nucleosides are linked to one another and/or to the remainder of the compound through cleavable bonds. In certain embodiments, such cleavable bonds are unmodified phosphodiester bonds. In certain embodiments, a cleavable moiety is 2′-deoxy nucleoside that is attached to either the 3′ or 5′-terminal nucleoside of an oligonucleotide by a phosphate internucleoside linkage and covalently attached to the remainder of the conjugate linker or conjugate moiety by a phosphate or phosphorothioate linkage. In certain such embodiments, the cleavable moiety is 2′-deoxyadenosine.

### Compositions and Methods for Formulating Pharmaceutical Compositions

[0389] Compounds described herein may be admixed with pharmaceutically acceptable active or inert substances for the preparation of pharmaceutical compositions or formulations. Compositions and methods for the formulation of pharmaceutical compositions are dependent upon a number of criteria, including, but not limited to, route of administration, extent of disease, or dose to be administered.

[0390] Certain embodiments provide pharmaceutical compositions comprising one or more compounds or a salt thereof. In certain embodiments, the compounds are antisense compounds or oligomeric compounds. In certain embodiments, the compounds comprise or consist of a modified oligonucleotide. In certain such embodiments, the pharmaceutical composition comprises a suitable pharmaceutically acceptable diluent or carrier. In certain embodiments, a pharmaceutical composition comprises a sterile saline solution and one or more compound. In certain embodiments, such pharmaceutical composition consists of a sterile saline solution and one or more compound. In certain embodiments, the sterile saline is pharmaceutical grade saline. In certain embodiments, a pharmaceutical composition comprises one or more compound and sterile water. In certain embodiments, a pharmaceutical composition consists of one compound and sterile water. In certain embodiments, the sterile water is pharmaceutical grade water. In certain embodiments, a pharmaceutical composition comprises one or more compound and phosphate-buffered saline (PBS). In certain embodiments, a pharmaceutical composition consists of one or more compound and sterile PBS. In certain embodiments, the sterile PBS is pharmaceutical grade PBS. Compositions and methods for the formulation of pharmaceutical compositions are dependent upon a number of criteria, including, but not limited to, route of administration, extent of disease, or dose to be administered.

[0391] A compound described herein targeted to FOXP3 nucleic acid can be utilized in pharmaceutical compositions by combining the compound with a suitable pharmaceutically acceptable diluent or carrier. In certain embodiments, a pharmaceutically acceptable diluent is water, such as sterile water suitable for injection. Accordingly, in one embodiment, employed in the methods described herein is a pharmaceutical composition comprising a compound targeted to FOXP3 nucleic acid and a pharmaceutically acceptable diluent. In certain embodiments, the pharmaceutically acceptable diluent is water. In certain embodiments, the compound comprises or consists of a modified oligonucleotide provided herein.

[0392] Pharmaceutical compositions comprising compounds provided herein encompass any pharmaceutically acceptable salts, esters, or salts of such esters, or any other oligonucleotide which, upon administration to an animal, including a human, is capable of providing (directly or indirectly) the biologically active metabolite or residue thereof. In certain embodiments, the compounds are antisense compounds or oligomeric compounds. In certain embodiments, the compound comprises or consists of a modified oligonucleotide. Accordingly, for example, the disclosure is also drawn to pharmaceutically acceptable salts of compounds, prodrugs, pharmaceutically acceptable salts of such prodrugs, and other bioequivalents. Suitable pharmaceutically acceptable salts include, but are not limited to, sodium and potassium salts.

[0393] A prodrug can include the incorporation of additional nucleosides at one or both ends of a compound which are cleaved by endogenous nucleases within the body, to form the active compound. In certain embodiments, the compounds or compositions further comprise a pharmaceutically acceptable carrier or diluent.

### EXAMPLES

[0394] The Examples below describe the screening process to identify lead compounds targeted to FOXP3. Out of over 3,000 oligonucleotides that were screened, ION 1062428, 1062641, 1062835, 1062937, 1063268, 1063649, 1063655, 1063734, 1064096, or 1064313 emerged as the top lead compounds.

### Non-Limiting Disclosure and Incorporation by Reference

[0395] Although the sequence listing accompanying this filing identifies each sequence as either “RNA” or “DNA” as required, in reality, those sequences may be modified with any combination of chemical modifications. One of skill in the art will readily appreciate that such designation as “RNA” or “DNA” to describe modified oligonucleotides is, in certain instances, arbitrary. For example, an oligonucleotide comprising a nucleoside comprising a 2′-OH sugar moiety and a thymine base could be described as a DNA having a modified sugar (2′-OH for the natural 2′-H of DNA) or as an RNA having a modified base (thymine (methylated uracil) for natural uracil of RNA).

[0396] Accordingly, nucleic acid sequences provided herein, including, but not limited to those in the sequence listing, are intended to encompass nucleic acids containing any combination of natural or modified RNA and/or DNA, including, but not limited to such nucleic acids having modified nucleobases. By way of further example and without limitation, an oligonucleotide having the nucleobase sequence “ATCGATCG” encompasses any oligonucleotides having such nucleobase sequence, whether modified or unmodified, including, but not limited to, such compounds comprising RNA bases, such as those having sequence “AUCGAUCG” and those having some DNA bases and some RNA bases such as “AUCGATCG” and compounds having other modified nucleobases, such as “AT^{m}CGAUCG,” wherein ^{m}C indicates a cytosine base comprising a methyl group at the 5-position.

[0397] While certain compounds, compositions and methods described herein have been described with specificity in accordance with certain embodiments, the following examples serve only to illustrate the compounds described herein and are not intended to limit the same. Each of the references recited in the present application is incorporated herein by reference in its entirety.

### Example 1: Antisense Inhibition of Human Foxp3 in LNCaP Cells by cEt Gapmers

[0398] Modified oligonucleotides were designed to target a Foxp3 nucleic acid and were tested for their effect on Foxp3 mRNA level in vitro. The modified oligonucleotides were tested in a series of experiments that had similar culture conditions. The results for each experiment are presented in separate tables shown below. Cultured LNCaP cells at a density of 30,000 cells per well were transfected using electroporation with 3,000 nM of modified oligonucleotide. After a treatment period of approximately 24 hours, RNA was isolated from the cells and Foxp3 mRNA levels were measured by quantitative real-time RTPCR. Human primer probe set RTS35925 (forward sequence CTACTTCAAGTTCCACAACATGC, designated herein as SEQ ID NO.: 6; reverse sequence CCAGTGGTAGATCTCATTGAGTG; designated herein as SEQ ID NO.: 7; probe sequence CCTTTCACCTACGCCACGCTCAT, designated herein as SEQ ID NO.: 8) was used to measure mRNA levels. Foxp3 mRNA levels were adjusted according to total RNA content, as measured by RIBOGREEN®. Results are presented in the tables below as percent control of the amount of Foxp3 mRNA relative to untreated control cells (% UTC). The modified oligonucleotides with percent control values marked with an asterisk (*) target the amplicon region of the primer probe set. Additional assays may be used to measure the potency and efficacy of the modified oligonucleotides targeting the amplicon region.

[0399] The newly designed modified oligonucleotides in the Tables below were designed as 3-10-3 cEt gapmers. The gapmers are 16 nucleosides in length, wherein the central gap segment comprises of ten 2′-deoxynucleosides and is flanked by wing segments on the 5′ direction and the 3′ direction comprising three nucleosides each. Each nucleoside in the 5′ wing segment and each nucleoside in the 3′ wing segment has a cEt sugar modification. The internucleoside linkages throughout each gapmer are phosphorothioate (P═S) linkages. All cytosine residues throughout each gapmer are 5-methylcytosines.

[0400] “Start site” indicates the 5′-most nucleoside to which the gapmer is targeted in the human gene sequence. “Stop site” indicates the 3′-most nucleoside to which the gapmer is targeted human gene sequence. Each gapmer listed in the Tables below is targeted to either SEQ ID NO.: 1 (GENBANK Accession No. NM_014009.3), or SEQ ID NO.: 2 (the complement of GENBANK Accession No. NT 011568.12 truncated from nucleotides 11907130 to 11921808), or SEQ ID No.: 3 (GENBANK Accession No. NM_001114377.1), or SEQ ID No.: 4 (the complement of GENBANK Accession No. NC_000023.11 truncated from nucleotides 49247001 to 49273000), or SEQ ID No. 5 (UCSC Accession No. UC064ZFP.1 corresponding to genomic co-ordinates chrX:49,251,334-49,259,240 on assembly GRCh38/hg38). ‘N/A’ indicates that the modified oligonucleotide does not target that particular gene sequence with 100% complementarity. ‘N. D.’ indicates that the % UTC is not defined for that particular modified oligonucleotide in that particular experiment. Activity of that modified oligonucleotide may be defined in a different experiment.

TABLE 1
Inhibition of Foxp3 mRNA by 3-10-3 cEt gapmers targeting
SEQ ID NO.: 1 and 2

| | SEQ ID | SEQ ID | SEQ ID | SEQ ID | | | |
|---|---|---|---|---|---|---|---|
| | NO: 1 | NO: 1 | NO: 2 | NO: 2 | | FOXP3 | SEQ |
| Compound | Start | Stop | Start | Stop | | (% | ID |
| Number | Site | Site | Site | Site | Sequence (5′ to 3′) | UTC) | NO |
| 895287 | 1168 | 1183 | 12038 | 12053 | TTGAAGTAGTCCATGT | 58* | 9 |
| 910921 | 7 | 22 | 407 | 422 | ATTTTTTTCGATGAGT | 49 | 10 |
| 910925 | 77 | 92 | 477 | 492 | TTTTATACCGAGAAGA | 45 | 11 |
| 910929 | 376 | 391 | 6914 | 6929 | TGCGATGGTGGCATGG | 44 | 12 |
| 910933 | 564 | 579 | 7727 | 7742 | GGCTGATCATGGCTGG | 35 | 13 |
| 910937 | 765 | 780 | 8411 | 8426 | CACCATTTGCCAGCAG | 50 | 14 |
| 910941 | 1000 | 1015 | N/A | N/A | TCGGATGATGCCACAG | 42 | 15 |
| 910945 | 1144 | 1159 | N/A | N/A | AACTCTGGGAATGTGC | 72 | 16 |
| 910949 | 1416 | 1431 | 13826 | 13841 | TGCGGAACTCCAGCTC | 127 | 17 |
| 910953 | 1591 | 1606 | 14001 | 14016 | GTGGAAACCTCACTTC | 62 | 18 |
| 910957 | 1802 | 1817 | 14212 | 14227 | GAAGTAATCTGTGCGA | 37 | 19 |
| 910961 | 2114 | 2129 | 14524 | 14539 | GAATTCTAACAGGCCG | 36 | 20 |
| 910965 | 2216 | 2231 | 14626 | 14641 | GGTATTTTTGGCAAGG | 23 | 21 |
| 910969 | 2336 | 2351 | N/A | N/A | CGGTACTGTGGGTTGG | 19 | 22 |
| 910973 | 1851 | 1866 | 14261 | 14276 | AGGGACAGGATTGTGA | 54 | 23 |
| 910977 | 726 | 741 | N/A | N/A | CCGAAAGGGTGCTGTC | 81 | 24 |
| 910981 | 164 | 179 | N/A | N/A | GTCCAAGGGCAGGCTT | 44 | 25 |
| 910985 | 618 | 633 | 7781 | 7796 | GGCCAGGCCGGGCCTT | 88 | 26 |
| 910989 | 63 | 78 | 463 | 478 | GAAAAACCACGCTGTA | 65 | 27 |
| 910993 | 772 | 787 | 8418 | 8433 | TTGCAGACACCATTTG | 88 | 28 |
| 911000 | 1267 | 1282 | 13497 | 13512 | TGGTAGATCTCATTGA | 69* | 29 |
| 911004 | 2108 | 2123 | 14518 | 14533 | TAACAGGCCGTGTGTG | 72 | 30 |
| 911008 | 1859 | 1874 | 14269 | 14284 | GTTGAGTGAGGGACAG | 54 | 31 |
| 911012 | 2272 | 2287 | N/A | N/A | AGGCATGGATCAGGGC | 32 | 32 |
| 911016 | 57 | 72 | 457 | 472 | CCACGCTGTACGGTGT | 39 | 33 |
| 911020 | 1257 | 1272 | 13487 | 13502 | CATTGAGTGTCCGCTG | 65* | 34 |
| 911024 | 382 | 397 | 6920 | 6935 | TGCAGCTGCGATGGTG | 59 | 35 |
| 911028 | 1741 | 1756 | 14151 | 14166 | GGCTGCAGGGCTCGAC | 25 | 36 |
| 911032 | 55 | 70 | 455 | 470 | ACGCTGTACGGTGTGG | 17 | 37 |
| 911036 | 898 | 913 | 9488 | 9503 | AGAGACTGTACCATCT | 121 | 38 |
| 911040 | 2112 | 2127 | 14522 | 14537 | ATTCTAACAGGCCGTG | 55 | 39 |
| 911044 | 2110 | 2125 | 14520 | 14535 | TCTAACAGGCCGTGTG | 56 | 40 |
| 911048 | 770 | 785 | 8416 | 8431 | GCAGACACCATTTGCC | 95 | 41 |
| 911052 | 163 | 178 | N/A | N/A | TCCAAGGGCAGGCTTG | 76 | 42 |
| 911056 | 2282 | 2297 | N/A | N/A | GTCTAAGCTGAGGCAT | 51 | 43 |
| 911060 | 133 | 148 | 533 | 548 | CAGAAAAGGATCAGCC | 63 | 44 |
| 911064 | 900 | 915 | 9490 | 9505 | CCAGAGACTGTACCAT | 90 | 45 |
| 911068 | N/A | N/A | 8373 | 8388 | GCCGAAAGGGTGCTGG | 73 | 46 |
| 911072 | N/A | N/A | 13638 | 13653 | TGCCTATGAGCCCAGA | 106 | 47 |
| 911076 | N/A | N/A | 13697 | 13712 | CGTCAACCTCTGAGGC | 111 | 48 |
| 911080 | N/A | N/A | 658 | 673 | GTACATCCCACTGTAC | 90 | 49 |
| 911084 | N/A | N/A | 1386 | 1401 | GACAATGGTGTGAAGT | 36 | 50 |
| 911088 | N/A | N/A | 1569 | 1584 | CTAATTTGGTTACAGA | 39 | 51 |
| 911092 | N/A | N/A | 2137 | 2152 | GTTAATAACCATTCCA | 50 | 52 |
| 911096 | N/A | N/A | 2390 | 2405 | CTCTATAGTAAATGGA | 78 | 53 |
| 911100 | N/A | N/A | 2663 | 2678 | TAAAATGCCCAGATCC | 54 | 54 |
| 911104 | N/A | N/A | 3219 | 3234 | TGACAATTGCCCCTCT | 115 | 55 |
| 911108 | N/A | N/A | 3358 | 3373 | TGCATTTCGGTGAGGC | 44 | 56 |
| 911112 | N/A | N/A | 4082 | 4097 | AGATTTAAAGGATCCT | 60 | 57 |
| 911116 | N/A | N/A | 4291 | 4306 | TGACATGGGTGCTGGT | 45 | 58 |
| 911120 | N/A | N/A | 5167 | 5182 | GGTATTAAGTTCTTAG | 21 | 59 |
| 911124 | N/A | N/A | 5704 | 5719 | GCTCATGCTACACCCC | 37 | 60 |
| 911128 | N/A | N/A | 5966 | 5981 | TGGATTGGGTGCAAAA | 60 | 61 |
| 911132 | N/A | N/A | 6111 | 6126 | GACTTAATCTGAAGCT | 50 | 62 |
| 911136 | N/A | N/A | 6376 | 6391 | CACTTGAGAGCTGTTT | 70 | 63 |
| 911140 | N/A | N/A | 6642 | 6657 | TGAGATACTCGACCAC | 95 | 64 |
| 911144 | N/A | N/A | 7355 | 7370 | TGCTATGATCATCCCC | 24 | 65 |
| 911148 | N/A | N/A | 7644 | 7659 | GCACATGTGGGCTGTG | 69 | 66 |
| 911152 | N/A | N/A | 7964 | 7979 | ATCTTTAAGGTTCTGC | 23 | 67 |
| 911156 | N/A | N/A | 8561 | 8576 | CTACTTATTGGGATGA | 50 | 68 |
| 911160 | N/A | N/A | 8686 | 8701 | CTTATTATACATACGA | 77 | 69 |
| 911164 | N/A | N/A | 8824 | 8839 | GATTCTAGAGCCTGGC | 39 | 70 |
| 911168 | N/A | N/A | 9505 | 9520 | GCATTACCTGCTGCTC | 85 | 71 |
| 911172 | N/A | N/A | 9603 | 9618 | CTTTATACCAGCCCTC | 68 | 72 |
| 911176 | N/A | N/A | 9878 | 9893 | CCTGAATGTGAGGTTA | 51 | 73 |
| 911180 | N/A | N/A | 10317 | 10332 | TGCTTTAACAACTCAG | 16 | 74 |
| 911184 | N/A | N/A | 10546 | 10561 | TACATTCGCATCATGA | 33 | 75 |
| 911188 | N/A | N/A | 10690 | 10705 | GTATTTATTAGAGCAC | 59 | 76 |
| 911192 | N/A | N/A | 11343 | 11358 | AGGATTAGGAGCTTGG | 33 | 77 |
| 911196 | N/A | N/A | 11615 | 11630 | GAATTACTTAGCAGGG | 47 | 78 |
| 911200 | N/A | N/A | 11825 | 11840 | CCAAAATAGTTCTCCC | 49 | 79 |
| 911204 | N/A | N/A | 11885 | 11900 | AGGTACTGTTTGCTGA | 65 | 80 |
| 911208 | N/A | N/A | 12242 | 12257 | CACATTTGAGGCACGG | 42 | 81 |
| 911212 | N/A | N/A | 12289 | 12304 | AGGTTTGGATTTGCGG | 45 | 82 |
| 911216 | N/A | N/A | 12398 | 12413 | GGCTATTTTATGGGTC | 64 | 83 |
| 911220 | N/A | N/A | 12706 | 12721 | GGGAATATCTGGTATC | 62 | 84 |
| 911224 | N/A | N/A | 12812 | 12827 | GATCAGTTTGGATTCA | 63 | 85 |
| 911228 | N/A | N/A | 12898 | 12913 | GGACATGGTTAGGTGG | 61 | 86 |

TABLE 2
Inhibition of Foxp3 mRNA by 3-10-3 cEt gapmers targeting
SEQ ID NO.: 1, and 2

| | SEQ ID | SEQ ID | SEQ ID | SEQ ID | | | |
|---|---|---|---|---|---|---|---|
| | NO: 1 | NO: 1 | NO: 2 | NO: 2 | | FOXP3 | SEQ |
| Compound | Start | Stop | Start | Stop | | (% | ID |
| Number | Site | Site | Site | Site | Sequence (5′ to 3′) | UTC) | NO |
| 910922 | 11 | 26 | 411 | 426 | CCAAATTTTTTTCGAT | 61 | 87 |
| 910926 | 80 | 95 | 480 | 495 | TGCTTTTATACCGAGA | 11 | 88 |
| 910930 | 485 | 500 | 7550 | 7565 | GTGCATGAAATGTGGC | 25 | 89 |
| 910934 | 694 | 709 | 8271 | 8286 | GGATTTGGGAAGGTGC | 59 | 90 |
| 910938 | 873 | 888 | 9463 | 9478 | GGAGACATTGTGCCCT | 45 | 91 |
| 910942 | 1022 | 1037 | 11178 | 11193 | TACGATGCAGCAGGAG | 59 | 92 |
| 910946 | 1174 | 1189 | 12044 | 12059 | TGGAACTTGAAGTAGT | 24* | 93 |
| 910950 | 1434 | 1449 | 13844 | 13859 | GCCTCTGGCTCCGTTT | 126 | 94 |
| 910954 | 1656 | 1671 | 14066 | 14081 | CAAAGGATATGATGGG | 76 | 95 |
| 910958 | 1896 | 1911 | 14306 | 14321 | GTGTACTGAGGCAGGC | 13 | 96 |
| 910962 | 2116 | 2131 | 14526 | 14541 | GTGAATTCTAACAGGC | 25 | 97 |
| 910966 | 2217 | 2232 | 14627 | 14642 | GGGTATTTTTGGCAAG | 46 | 98 |
| 910970 | 2360 | 2375 | N/A | N/A | AGCTCGGCTGCAGTTT | 41 | 99 |
| 910974 | 434 | 449 | 7499 | 7514 | GCCCAGCCGTGCCCCG | 64 | 100 |
| 910978 | 69 | 84 | 469 | 484 | CGAGAAGAAAAACCAC | 30 | 101 |
| 910982 | 1464 | 1479 | 13874 | 13889 | GGCCAGGTGTAGGGTT | 75 | 102 |
| 910986 | 1310 | 1325 | 13540 | 13555 | GGCAGGATGGTTTCTG | 99 | 103 |
| 910990 | 500 | 515 | 7663 | 7678 | CACCGTTGAGAGCTGG | 39 | 104 |
| 910994 | 768 | 783 | 8414 | 8429 | AGACACCATTTGCCAG | 62 | 105 |
| 910997 | 148 | 163 | 548 | 563 | GGTGAAGTGGACTGAC | 25 | 106 |
| 911001 | 1400 | 1415 | 13810 | 13825 | ATCCACGGTCCACACA | 96 | 107 |
| 911005 | 1219 | 1234 | N/A | N/A | GCCCAGCGGATGAGCG | 33* | 108 |
| 911009 | 1657 | 1672 | 14067 | 14082 | GCAAAGGATATGATGG | 59 | 109 |
| 911013 | 2277 | 2292 | N/A | N/A | AGCTGAGGCATGGATC | 62 | 110 |
| 911017 | 1739 | 1754 | 14149 | 14164 | CTGCAGGGCTCGACTG | 50 | 111 |
| 911021 | 902 | 917 | 9492 | 9507 | CTCCAGAGACTGTACC | 82 | 112 |
| 911025 | 38 | 53 | 438 | 453 | AGCCGCAGACCTCTCT | 39 | 113 |
| 911029 | 65 | 80 | 465 | 480 | AAGAAAAACCACGCTG | 70 | 114 |
| 911033 | 2111 | 2126 | 14521 | 14536 | TTCTAACAGGCCGTGT | 57 | 115 |
| 911037 | 818 | 833 | 8464 | 8479 | GAGGAAGTCCTCTGGC | 43 | 116 |
| 911041 | 875 | 890 | 9465 | 9480 | GAGGAGACATTGTGCC | 43 | 117 |
| 911045 | 879 | 894 | 9469 | 9484 | TCTGGAGGAGACATTG | 62 | 118 |
| 911049 | 327 | 342 | 6865 | 6880 | CTCGAAGATCTCGGCC | 69 | 119 |
| 911053 | 64 | 79 | 464 | 479 | AGAAAAACCACGCTGT | 46 | 120 |
| 911057 | 2109 | 2124 | 14519 | 14534 | CTAACAGGCCGTGTGT | 49 | 121 |
| 911061 | 1850 | 1865 | 14260 | 14275 | GGGACAGGATTGTGAC | 53 | 122 |
| 911065 | 1598 | 1613 | 14008 | 14023 | CAAGACAGTGGAAACC | 45 | 123 |
| 911069 | N/A | N/A | 13585 | 13600 | GGCCATCCCAGTCACC | 72 | 124 |
| 911073 | N/A | N/A | 13670 | 13685 | ACCAACAACCCACATC | 107 | 125 |
| 911077 | N/A | N/A | 13663 | 13678 | ACCCACATCCCGTTCC | 55 | 126 |
| 911081 | N/A | N/A | 745 | 760 | ATTAAGTACTTCACCT | 75 | 127 |
| 911085 | N/A | N/A | 1447 | 1462 | ATATGGACTCTGGTCA | 34 | 128 |
| 911089 | N/A | N/A | 1828 | 1843 | AAAAATGCACGCCCCC | 62 | 129 |
| 911093 | N/A | N/A | 2163 | 2178 | GCTATATATGTAATGG | 16 | 130 |
| 911097 | N/A | N/A | 2522 | 2537 | ATAACCATTGCAGTAC | 33 | 131 |
| 911101 | N/A | N/A | 2734 | 2749 | GTGAATAGTCAGTCCA | 21 | 132 |
| 911105 | N/A | N/A | 3246 | 3261 | TCATTAGGTGTCTGCA | 17 | 133 |
| 911109 | N/A | N/A | 3711 | 3726 | CAATCAAGGTTTTCGG | 35 | 134 |
| 911113 | N/A | N/A | 4083 | 4098 | TAGATTTAAAGGATCC | 45 | 135 |
| 911117 | N/A | N/A | 4442 | 4457 | CCAGATTTTTCCGCCA | 48 | 136 |
| 911121 | N/A | N/A | 5275 | 5290 | AGTATAGAAGGGTTCT | 38 | 137 |
| 911125 | N/A | N/A | 5819 | 5834 | CAGCATGGCAAGTGAC | 66 | 138 |
| 911129 | N/A | N/A | 6042 | 6057 | AGTGACATGGGTTTTA | 34 | 139 |
| 911133 | N/A | N/A | 6197 | 6212 | GCTATTGTAACAGTCC | 20 | 140 |
| 911137 | N/A | N/A | 6497 | 6512 | GTACATGTACATACCC | 59 | 141 |
| 911141 | N/A | N/A | 6992 | 7007 | ACAGTAAAGGTCGGCA | 49 | 142 |
| 911145 | N/A | N/A | 7422 | 7437 | GGCCATCCTGATCCTC | 59 | 143 |
| 911149 | N/A | N/A | 7866 | 7881 | GCCTACACTGCTCACA | 44 | 144 |
| 911153 | N/A | N/A | 8186 | 8201 | CACCTATGGAGGCTGT | 86 | 145 |
| 911157 | N/A | N/A | 8565 | 8580 | CTTACTACTTATTGGG | 78 | 146 |
| 911161 | N/A | N/A | 8687 | 8702 | TCTTATTATACATACG | 61 | 147 |
| 911165 | N/A | N/A | 8859 | 8874 | TGGCATGAGGAGTAGC | 57 | 148 |
| 911169 | N/A | N/A | 9506 | 9521 | GGCATTACCTGCTGCT | 78 | 149 |
| 911173 | N/A | N/A | 9604 | 9619 | CCTTTATACCAGCCCT | 59 | 150 |
| 911177 | N/A | N/A | 9921 | 9936 | GGGCATGTTTGGAGCT | 58 | 151 |
| 911181 | N/A | N/A | 10330 | 10345 | GGCTATTTGCATTTGC | 28 | 152 |
| 911185 | N/A | N/A | 10551 | 10566 | ATCTGTACATTCGCAT | 28 | 153 |
| 911189 | N/A | N/A | 10691 | 10706 | CGTATTTATTAGAGCA | 41 | 154 |
| 911193 | N/A | N/A | 11446 | 11461 | GCGGATGCATTTTCCC | 32 | 155 |
| 911197 | N/A | N/A | 11617 | 11632 | TGGAATTACTTAGCAG | 47 | 156 |
| 911201 | N/A | N/A | 11826 | 11841 | GCCAAAATAGTTCTCC | 42 | 157 |
| 911205 | N/A | N/A | 11909 | 11924 | GTCAACACCCGTGTCC | 57 | 158 |
| 911209 | N/A | N/A | 12243 | 12258 | TCACATTTGAGGCACG | 38 | 159 |
| 911213 | N/A | N/A | 12295 | 12310 | TGGTTTAGGTTTGGAT | 68 | 160 |
| 911217 | N/A | N/A | 12406 | 12421 | TAGCTTTAGGCTATTT | 72 | 161 |
| 911221 | N/A | N/A | 12771 | 12786 | GATGATTGCAGTGAGG | 40 | 162 |
| 911225 | N/A | N/A | 12820 | 12835 | GGGAATTTGATCAGTT | 79 | 163 |
| 911229 | N/A | N/A | 12928 | 12943 | GTTTGAATTATCGAGT | 59 | 164 |

TABLE 3
Inhibition of Foxp3 mRNA by 3-10-3 cEt gapmers targeting
SEQ ID NO.: 1, and 2

| | SEQ ID | SEQ ID | SEQ ID | SEQ ID | | | |
|---|---|---|---|---|---|---|---|
| | NO: 1 | NO: 1 | NO: 2 | NO: 2 | | FOXP3 | SEQ |
| Compound | Start | Stop | Start | Stop | | (% | ID |
| Number | Site | Site | Site | Site | Sequence (5′ to 3′) | UTC) | NO |
| 910923 | 12 | 27 | 412 | 427 | TCCAAATTTTTTTCGA | 52 | 165 |
| 910927 | 178 | 193 | 6716 | 6731 | GGCATCGGGTCCTTGT | 51 | 166 |
| 910931 | 507 | 522 | 7670 | 7685 | GGGCATCCACCGTTGA | 57 | 167 |
| 910935 | 709 | 724 | 8286 | 8301 | TTCCTGGGTGCACTGG | 56 | 168 |
| 910939 | 944 | 959 | 9739 | 9754 | CTGCATGGCACTCAGC | 33 | 169 |
| 910943 | 1024 | 1039 | 11180 | 11195 | GCTACGATGCAGCAGG | 29 | 170 |
| 910947 | 1260 | 1275 | 13490 | 13505 | TCTCATTGAGTGTCCG | 27* | 171 |
| 910951 | 1552 | 1567 | 13962 | 13977 | GGCCTATCATCCCTGC | 96 | 172 |
| 910955 | 1799 | 1814 | 14209 | 14224 | GTAATCTGTGCGAGCA | 19 | 173 |
| 910959 | 1922 | 1937 | 14332 | 14347 | GATGATGCAGCTTTGA | 19 | 174 |
| 910963 | 2117 | 2132 | 14527 | 14542 | GGTGAATTCTAACAGG | 26 | 175 |
| 910967 | 2303 | 2318 | N/A | N/A | TAAATGAGTAGTTCCT | 37 | 176 |
| 910971 | 992 | 1007 | N/A | N/A | TGCCACAGATGAAGCC | 63 | 177 |
| 910975 | 72 | 87 | 472 | 487 | TACCGAGAAGAAAAAC | 56 | 178 |
| 910979 | 1855 | 1870 | 14265 | 14280 | AGTGAGGGACAGGATT | 36 | 179 |
| 910983 | 2072 | 2087 | 14482 | 14497 | CCTCAGATCCTGAGGG | 81 | 180 |
| 910987 | 421 | 436 | 7486 | 7501 | CCGGAGGGTGCCACCA | 52 | 181 |
| 910991 | 1092 | 1107 | 11248 | 11263 | CAAACAGGCTGTCAGG | 65 | 182 |
| 910995 | 78 | 93 | 478 | 493 | CTTTTATACCGAGAAG | 38 | 183 |
| 910998 | 1374 | 1389 | 13784 | 13799 | CGCTCTCCACCCGCAC | 41 | 184 |
| 911002 | 42 | 57 | 442 | 457 | TGGAAGCCGCAGACCT | 28 | 185 |
| 911006 | 2287 | 2302 | N/A | N/A | CTGCAGTCTAAGCTGA | 63 | 186 |
| 911010 | 423 | 438 | 7488 | 7503 | CCCCGGAGGGTGCCAC | 62 | 187 |
| 911014 | 1892 | 1907 | 14302 | 14317 | ACTGAGGCAGGCTCTC | 16 | 188 |
| 911018 | 1458 | 1473 | 13868 | 13883 | GTGTAGGGTTGGAACA | 84 | 189 |
| 911022 | 599 | 614 | 7762 | 7777 | GGAGAAGACCCCAGTG | 55 | 190 |
| 911026 | 66 | 81 | 466 | 481 | GAAGAAAAACCACGCT | 56 | 191 |
| 911030 | 2355 | 2370 | N/A | N/A | GGCTGCAGTTTATTGG | 36 | 192 |
| 911034 | 132 | 147 | 532 | 547 | AGAAAAGGATCAGCCT | 65 | 193 |
| 911038 | 1459 | 1474 | 13869 | 13884 | GGTGTAGGGTTGGAAC | 70 | 194 |
| 911042 | 59 | 74 | 459 | 474 | AACCACGCTGTACGGT | 44 | 195 |
| 911046 | 131 | 146 | 531 | 546 | GAAAAGGATCAGCCTG | 52 | 196 |
| 911050 | 326 | 341 | 6864 | 6879 | TCGAAGATCTCGGCCC | 94 | 197 |
| 911054 | 1517 | 1532 | 13927 | 13942 | CACCAGTTTGGCCCCT | 39 | 198 |
| 911058 | 52 | 67 | 452 | 467 | CTGTACGGTGTGGAAG | 51 | 199 |
| 911062 | 76 | 91 | 476 | 491 | TTTATACCGAGAAGAA | 38 | 200 |
| 911070 | N/A | N/A | 13594 | 13609 | GGCACTTGAGGCCATC | 74 | 201 |
| 911074 | N/A | N/A | 13661 | 13676 | CCACATCCCGTTCCTC | 62 | 202 |
| 911078 | N/A | N/A | 13570 | 13585 | CGCCACCTCAGAGGAG | 104 | 203 |
| 911082 | N/A | N/A | 1258 | 1273 | AACTGATGCTCACTCT | 66 | 204 |
| 911086 | N/A | N/A | 1495 | 1510 | TGCAGAATCGAGCTCA | 27 | 205 |
| 911090 | N/A | N/A | 1923 | 1938 | CATAATAATACTCACC | 63 | 206 |
| 911094 | N/A | N/A | 2189 | 2204 | CAAATGATGAATTGGG | 23 | 207 |
| 911098 | N/A | N/A | 2610 | 2625 | GGGTTTATTGTGTGTC | 13 | 208 |
| 911102 | N/A | N/A | 2766 | 2781 | TGAGATAATTAGGGAG | 25 | 209 |
| 911106 | N/A | N/A | 3269 | 3284 | CCCTTCTACGCTGTCT | 39 | 210 |
| 911110 | N/A | N/A | 3753 | 3768 | GCCAATACAGAGCCCA | 9 | 211 |
| 911114 | N/A | N/A | 4155 | 4170 | ACAGATACTGGGACCC | 34 | 212 |
| 911118 | N/A | N/A | 4660 | 4675 | GCATAGATACATTCTC | 15 | 213 |
| 911122 | N/A | N/A | 5541 | 5556 | GGCTTTTCAGGATCCT | 57 | 214 |
| 911126 | N/A | N/A | 5937 | 5952 | TAGACATGAAGAGTCT | 69 | 215 |
| 911130 | N/A | N/A | 6108 | 6123 | TTAATCTGAAGCTGGA | 64 | 216 |
| 911134 | N/A | N/A | 6271 | 6286 | TCCTATTTTGCCCCAG | 48 | 217 |
| 911138 | N/A | N/A | 6498 | 6513 | GGTACATGTACATACC | 59 | 218 |
| 911142 | N/A | N/A | 7068 | 7083 | TGCATAAGTCACAGAC | 45 | 219 |
| 911146 | N/A | N/A | 7561 | 7576 | GTCCATACCTGGTGCA | 51 | 220 |
| 911150 | N/A | N/A | 7886 | 7901 | GAGTACTGCAATTCAG | 45 | 221 |
| 911154 | N/A | N/A | 8495 | 8510 | GTAGACTGGCACAGGC | 72 | 222 |
| 911158 | N/A | N/A | 8581 | 8596 | AGTTTAGCTCTTGCAT | 36 | 223 |
| 911162 | N/A | N/A | 8710 | 8725 | GGGTAAATAACAGCAC | 17 | 224 |
| 911166 | N/A | N/A | 9385 | 9400 | GGTGACCACGACAGGC | 62 | 225 |
| 911170 | N/A | N/A | 9538 | 9553 | CACTATCCCTATCCCT | 50 | 226 |
| 911174 | N/A | N/A | 9646 | 9661 | CCAGGCTACGGTCTTC | 64 | 227 |
| 911178 | N/A | N/A | 10311 | 10326 | AACAACTCAGGATCAC | 28 | 228 |
| 911182 | N/A | N/A | 10378 | 10393 | GGTTACATAGCTGGTC | 19 | 229 |
| 911186 | N/A | N/A | 10625 | 10640 | TTGAATAGGGCTCTTT | 51 | 230 |
| 911190 | N/A | N/A | 10692 | 10707 | CCGTATTTATTAGAGC | 49 | 231 |
| 911194 | N/A | N/A | 11447 | 11462 | AGCGGATGCATTTTCC | 21 | 232 |
| 911198 | N/A | N/A | 11683 | 11698 | TGGATAGGTGAGCTCG | 34 | 233 |
| 911202 | N/A | N/A | 11846 | 11861 | TTATTCTTTGCACCAC | 33 | 234 |
| 911206 | N/A | N/A | 11921 | 11936 | TGAGATCTCACCGTCA | 83 | 235 |
| 911210 | N/A | N/A | 12245 | 12260 | GGTCACATTTGAGGCA | 49 | 236 |
| 911214 | N/A | N/A | 12303 | 12318 | CTGGATGGTGGTTTAG | 82 | 237 |
| 911218 | N/A | N/A | 12528 | 12543 | GTATTGACATACTGGG | 35 | 238 |
| 911222 | N/A | N/A | 12777 | 12792 | AGCGATGATGATTGCA | 64 | 239 |
| 911226 | N/A | N/A | 12821 | 12836 | AGGGAATTTGATCAGT | 43 | 240 |
| 911230 | N/A | N/A | 13042 | 13057 | CCAACTTAAGGGTCAG | 42 | 241 |

TABLE 4
Inhibition of Foxp3 mRNA by 3-10-3 cEt gapmers targeting
SEQ ID NO.: 1, and 2

| | SEQ ID | SEQ ID | SEQ ID | SEQ ID | | | |
|---|---|---|---|---|---|---|---|
| | NO: 1 | NO: 1 | NO: 2 | NO: 2 | | FOXP3 | SEQ |
| Compound | Start | Stop | Start | Stop | | (% | ID |
| Number | Site | Site | Site | Site | Sequence (5′ to 3′) | UTC) | NO |
| 910924 | 54 | 69 | 454 | 469 | CGCTGTACGGTGTGGA | 13 | 242 |
| 910928 | 269 | 284 | 6807 | 6822 | GGCTTTGGGTGCAGCC | 96 | 243 |
| 910932 | 560 | 575 | 7723 | 7738 | GATCATGGCTGGGCTC | 28 | 244 |
| 910936 | 749 | 764 | 8395 | 8410 | TGGGTAGGAGCTCTGG | 27 | 245 |
| 910940 | 946 | 961 | 9741 | 9756 | GCCTGCATGGCACTCA | 43 | 246 |
| 910944 | 1028 | 1043 | 11184 | 11199 | AGCAGCTACGATGCAG | 53 | 247 |
| 910948 | 1309 | 1324 | 13539 | 13554 | GCAGGATGGTTTCTGA | 99 | 248 |
| 910952 | 1562 | 1577 | 13972 | 13987 | GCACATCCAGGGCCTA | 25 | 249 |
| 910956 | 1800 | 1815 | 14210 | 14225 | AGTAATCTGTGCGAGC | 10 | 250 |
| 910960 | 2113 | 2128 | 14523 | 14538 | AATTCTAACAGGCCGT | 25 | 251 |
| 910964 | 2180 | 2195 | 14590 | 14605 | GTCTGCACGGGACTCA | 33 | 252 |
| 910968 | 2304 | 2319 | N/A | N/A | ATAAATGAGTAGTTCC | 28 | 253 |
| 910972 | 324 | 339 | 6862 | 6877 | GAAGATCTCGGCCCTG | 47 | 254 |
| 910976 | 2301 | 2316 | N/A | N/A | AATGAGTAGTTCCTCT | 35 | 255 |
| 910980 | 71 | 86 | 471 | 486 | ACCGAGAAGAAAAACC | 18 | 256 |
| 910984 | 385 | 400 | N/A | N/A | AGCTGCAGCTGCGATG | 44 | 257 |
| 910988 | 75 | 90 | 475 | 490 | TTATACCGAGAAGAAA | 68 | 258 |
| 910992 | 1893 | 1908 | 14303 | 14318 | TACTGAGGCAGGCTCT | 27 | 259 |
| 910996 | 36 | 51 | 436 | 451 | CCGCAGACCTCTCTCT | 36 | 260 |
| 910999 | 2302 | 2317 | N/A | N/A | AAATGAGTAGTTCCTC | 50 | 261 |
| 911003 | 413 | 428 | 7478 | 7493 | TGCCACCATGACTAGG | 62 | 262 |
| 911007 | 985 | 1000 | 9780 | 9795 | GATGAAGCCTTGGTCA | 50 | 263 |
| 911011 | 1901 | 1916 | 14311 | 14326 | TTTGAGTGTACTGAGG | 12 | 264 |
| 911015 | 1849 | 1864 | 14259 | 14274 | GGACAGGATTGTGACA | 56 | 265 |
| 911019 | 1792 | 1807 | 14202 | 14217 | GTGCGAGCAGCTGAGG | 13 | 266 |
| 911023 | 79 | 94 | 479 | 494 | GCTTTTATACCGAGAA | 5 | 267 |
| 911027 | 725 | 740 | N/A | N/A | CGAAAGGGTGCTGTCC | 78 | 268 |
| 911031 | 727 | 742 | N/A | N/A | GCCGAAAGGGTGCTGT | 48 | 269 |
| 911035 | 147 | 162 | 547 | 562 | GTGAAGTGGACTGACA | 43 | 270 |
| 911039 | 62 | 77 | 462 | 477 | AAAAACCACGCTGTAC | 61 | 271 |
| 911043 | 2280 | 2295 | N/A | N/A | CTAAGCTGAGGCATGG | 35 | 272 |
| 911047 | 659 | 674 | 8236 | 8251 | GGACACCCATTCCAGG | 59 | 273 |
| 911051 | 116 | 131 | 516 | 531 | GGCTTGTGGGAAACTG | 17 | 274 |
| 911055 | 158 | 173 | N/A | N/A | GGGCAGGCTTGGTGAA | 82 | 275 |
| 911059 | 43 | 58 | 443 | 458 | GTGGAAGCCGCAGACC | 23 | 276 |
| 911063 | 1169 | 1184 | 12039 | 12054 | CTTGAAGTAGTCCATG | 49* | 277 |
| 911067 | N/A | N/A | 8302 | 8317 | GTCCACTGACCTGTCC | 111 | 278 |
| 911071 | N/A | N/A | 13600 | 13615 | TGCGATGGCACTTGAG | 51 | 279 |
| 911075 | N/A | N/A | 13564 | 13579 | CTCAGAGGAGCTCACC | 87 | 280 |
| 911079 | N/A | N/A | 13595 | 13610 | TGGCACTTGAGGCCAT | 119 | 281 |
| 911083 | N/A | N/A | 1275 | 1290 | GCTACTAGGGTGAACA | 22 | 282 |
| 911087 | N/A | N/A | 1547 | 1562 | AATAGCTAACACTTCG | 32 | 283 |
| 911091 | N/A | N/A | 2068 | 2083 | GGAGTAAGGACATGAC | 27 | 284 |
| 911095 | N/A | N/A | 2233 | 2248 | ATCATAAGCATCACAA | 49 | 285 |
| 911099 | N/A | N/A | 2639 | 2654 | TATAAGTTTTAACACC | 62 | 286 |
| 911103 | N/A | N/A | 2941 | 2956 | TGTATTGCAAAGCAAC | 38 | 287 |
| 911107 | N/A | N/A | 3357 | 3372 | GCATTTCGGTGAGGCC | 39 | 288 |
| 911111 | N/A | N/A | 3802 | 3817 | TGCCTTTGGTCTGGGC | 56 | 289 |
| 911115 | N/A | N/A | 4248 | 4263 | CACTATGACAAGCCCC | 29 | 290 |
| 911119 | N/A | N/A | 4945 | 4960 | TCCCTTATGGCCCCCA | 25 | 291 |
| 911123 | N/A | N/A | 5629 | 5644 | TTCTATTGTCCTCACC | 68 | 292 |
| 911127 | N/A | N/A | 5938 | 5953 | ATAGACATGAAGAGTC | 50 | 293 |
| 911131 | N/A | N/A | 6109 | 6124 | CTTAATCTGAAGCTGG | 22 | 294 |
| 911135 | N/A | N/A | 6309 | 6324 | CATCTTGCCGGAGCTG | 26 | 295 |
| 911139 | N/A | N/A | 6564 | 6579 | CCCATAGTTGCACCCC | 44 | 296 |
| 911143 | N/A | N/A | 7174 | 7189 | ACTACAATACGGCCTC | 44 | 297 |
| 911147 | N/A | N/A | 7572 | 7587 | GCCCATTCACCGTCCA | 48 | 298 |
| 911151 | N/A | N/A | 7963 | 7978 | TCTTTAAGGTTCTGCA | 40 | 299 |
| 911155 | N/A | N/A | 8496 | 8511 | GGTAGACTGGCACAGG | 33 | 300 |
| 911159 | N/A | N/A | 8684 | 8699 | TATTATACATACGAGA | 81 | 301 |
| 911163 | N/A | N/A | 8767 | 8782 | AGATTTTGATCAAGAC | 25 | 302 |
| 911167 | N/A | N/A | 9399 | 9414 | GAAGATTCCATGCAGG | 75 | 303 |
| 911171 | N/A | N/A | 9540 | 9555 | CGCACTATCCCTATCC | 12 | 304 |
| 911175 | N/A | N/A | 9868 | 9883 | AGGTTAGGTTCCCTGC | 34 | 305 |
| 911179 | N/A | N/A | 10316 | 10331 | GCTTTAACAACTCAGG | 10 | 306 |
| 911183 | N/A | N/A | 10451 | 10466 | GGTTATGTGGCACCCT | 21 | 307 |
| 911187 | N/A | N/A | 10686 | 10701 | TTATTAGAGCACAGGT | 72 | 308 |
| 911191 | N/A | N/A | 10716 | 10731 | TGGAATCCCACAAAAC | 61 | 309 |
| 911195 | N/A | N/A | 11611 | 11626 | TACTTAGCAGGGTCCC | 37 | 310 |
| 911199 | N/A | N/A | 11684 | 11699 | GTGGATAGGTGAGCTC | 29 | 311 |
| 911203 | N/A | N/A | 11864 | 11879 | TGACATAAGTTGTATC | 46 | 312 |
| 911207 | N/A | N/A | 11994 | 12009 | ATGAATCAAGCCCCAT | 95 | 313 |
| 911211 | N/A | N/A | 12284 | 12299 | TGGATTTGCGGACAGG | 33 | 314 |
| 911215 | N/A | N/A | 12324 | 12339 | CAGAATTTGGCATGCT | 51 | 315 |
| 911219 | N/A | N/A | 12530 | 12545 | GTGTATTGACATACTG | 67 | 316 |
| 911223 | N/A | N/A | 12790 | 12805 | GGATTACAGAGTCAGC | 36 | 317 |
| 911227 | N/A | N/A | 12893 | 12908 | TGGTTAGGTGGTTAGG | 59 | 318 |
| 911231 | N/A | N/A | 13242 | 13257 | GGGTATGGTTGTTCTG | 38 | 319 |

TABLE 5
Inhibition of Foxp3 mRNA by 3-10-3 cEt gapmers targeting
SEQ ID NO.: 1, and 2

| | SEQ ID | SEQ ID | SEQ ID | SEQ ID | | | |
|---|---|---|---|---|---|---|---|
| | NO: 1 | NO: 1 | NO: 2 | NO: 2 | | FOXP3 | SEQ |
| Compound | Start | Stop | Start | Stop | | (% | ID |
| Number | Site | Site | Site | Site | Sequence (5′ to 3′) | UTC) | NO |
| 911144 | N/A | N/A | 7355 | 7370 | TGCTATGATCATCCCC | 32 | 65 |
| 1062005 | 1 | 16 | 401 | 416 | TTCGATGAGTGTGTGC | 43 | 320 |
| 1062037 | 118 | 133 | 518 | 533 | CTGGCTTGTGGGAAAC | 30 | 321 |
| 1062069 | 310 | 325 | 6848 | 6863 | TGGAAGGTTCCCCCTG | 110 | 322 |
| 1062101 | 422 | 437 | 7487 | 7502 | CCCGGAGGGTGCCACC | 212 | 323 |
| 1062133 | 594 | 609 | 7757 | 7772 | AGACCCCAGTGGCGGT | 69 | 324 |
| 1062165 | 752 | 767 | 8398 | 8413 | CAGTGGGTAGGAGCTC | 150 | 325 |
| 1062197 | 869 | 884 | 9459 | 9474 | ACATTGTGCCCTGCCC | 24 | 326 |
| 1062229 | 1049 | 1064 | 11205 | 11220 | GACGACAGGGCCTTGG | 53 | 327 |
| 1062261 | 1181 | 1196 | 12051 | 12066 | CATGTTGTGGAACTTG | 65* | 328 |
| 1062293 | 1423 | 1438 | 13833 | 13848 | CGTTTCTTGCGGAACT | 105 | 329 |
| 1062325 | 1592 | 1607 | 14002 | 14017 | AGTGGAAACCTCACTT | 86 | 330 |
| 1062357 | 1848 | 1863 | 14258 | 14273 | GACAGGATTGTGACAT | 43 | 331 |
| 1062389 | 2026 | 2041 | 14436 | 14451 | GCACACCCCTGTGTTG | 61 | 332 |
| 1062421 | 2208 | 2223 | 14618 | 14633 | TGGCAAGGCAGTGTGT | 68 | 333 |
| 1062453 | N/A | N/A | 8298 | 8313 | ACTGACCTGTCCTTCC | 318 | 334 |
| 1062485 | N/A | N/A | 13599 | 13614 | GCGATGGCACTTGAGG | 143 | 335 |
| 1062549 | N/A | N/A | 684 | 699 | TACCTGGCTGGAATCA | 64 | 336 |
| 1062581 | N/A | N/A | 866 | 881 | ACAGCATTTCAAGTTG | 113 | 337 |
| 1062613 | N/A | N/A | 1108 | 1123 | GATCGATGGAGTGTGG | 104 | 338 |
| 1062645 | N/A | N/A | 1237 | 1252 | AATGTAAAGGTCCTCG | 23 | 339 |
| 1062678 | N/A | N/A | 1337 | 1352 | AAAGCGATACAAGCAA | 30 | 340 |
| 1062710 | N/A | N/A | 1475 | 1490 | AGCCCTGAACAACCTG | 67 | 341 |
| 1062742 | N/A | N/A | 1721 | 1736 | CGGCACTTGGTCAAAT | 102 | 342 |
| 1062774 | N/A | N/A | 1877 | 1892 | ATAGGACAACCTTTTG | 40 | 343 |
| 1062806 | N/A | N/A | 2074 | 2089 | CTATTAGGAGTAAGGA | 172 | 344 |
| 1062838 | N/A | N/A | 2159 | 2174 | TATATGTAATGGCTGA | 11 | 345 |
| 1062870 | N/A | N/A | 2391 | 2406 | CCTCTATAGTAAATGG | 62 | 346 |
| 1062902 | N/A | N/A | 2585 | 2600 | GCTAAGTATTTACTGT | 68 | 347 |
| 1062934 | N/A | N/A | 2731 | 2746 | AATAGTCAGTCCATTA | 46 | 348 |
| 1062966 | N/A | N/A | 2866 | 2881 | GAAAGCTTGGACATGG | 34 | 349 |
| 1062998 | N/A | N/A | 3067 | 3082 | GCGAGAGGAGGATTGC | 65 | 350 |
| 1063030 | N/A | N/A | 3244 | 3259 | ATTAGGTGTCTGCAGG | 74 | 351 |
| 1063062 | N/A | N/A | 3389 | 3404 | GAGATCTAGGCTTGGA | 21 | 352 |
| 1063094 | N/A | N/A | 3641 | 3656 | ATCACCACGCTCTGGC | 31 | 353 |
| 1063126 | N/A | N/A | 3863 | 3878 | CCAAATACATGGCCAC | 133 | 354 |
| 1063158 | N/A | N/A | 4102 | 4117 | ATCATAGAACAGCATT | 19 | 355 |
| 1063190 | N/A | N/A | 4223 | 4238 | AGACCTGGCCCTTCTT | 122 | 356 |
| 1063222 | N/A | N/A | 4402 | 4417 | CCGGGCTTCATCGACA | 99 | 357 |
| 1063253 | N/A | N/A | 4555 | 4570 | TCCCTTTCTGACTGGG | 198 | 358 |
| 1063285 | N/A | N/A | 4710 | 4725 | AGAGCTAAGAATTCTC | 65 | 359 |
| 1063317 | N/A | N/A | 5080 | 5095 | CTGGGAGAGCACTGGT | 62 | 360 |
| 1063349 | N/A | N/A | 5274 | 5289 | GTATAGAAGGGTTCTG | 43 | 361 |
| 1063381 | N/A | N/A | 5482 | 5497 | CAGCCAACCCCATTAT | 134 | 362 |
| 1063413 | N/A | N/A | 5655 | 5670 | CTGTCCAAGCCACGCA | 96 | 363 |
| 1063445 | N/A | N/A | 5855 | 5870 | AGGAGGCGAGTCCAGG | 65 | 364 |
| 1063477 | N/A | N/A | 6012 | 6027 | AAGGACCGAGCTGACA | 39 | 365 |
| 1063509 | N/A | N/A | 6133 | 6148 | GCGAGAAGTGGGTAGA | 47 | 366 |
| 1063541 | N/A | N/A | 6280 | 6295 | TCCTCGGAGTCCTATT | 163 | 367 |
| 1063573 | N/A | N/A | 6449 | 6464 | GGCTTGCCTGCCCACG | 65 | 368 |
| 1063605 | N/A | N/A | 6969 | 6984 | GTCCAGGTACCCCACC | 100 | 369 |
| 1063637 | N/A | N/A | 7171 | 7186 | ACAATACGGCCTCCTC | 127 | 370 |
| 1063669 | N/A | N/A | 7376 | 7391 | ACTGCAAGCCCACATG | 84 | 371 |
| 1063701 | N/A | N/A | 7802 | 7817 | CTGAGGTGTTACCAGG | 35 | 372 |
| 1063733 | N/A | N/A | 7968 | 7983 | CTGCATCTTTAAGGTT | 60 | 373 |
| 1063765 | N/A | N/A | 8045 | 8060 | GCTTAAAGACGGCCAT | 88 | 374 |
| 1063796 | N/A | N/A | 8559 | 8574 | ACTTATTGGGATGAAG | 92 | 375 |
| 1063828 | N/A | N/A | 8848 | 8863 | GTAGCAGGGCAAAGCA | 69 | 376 |
| 1063860 | N/A | N/A | 9051 | 9066 | TAAGGGTTGTGTGTAG | 318 | 377 |
| 1063892 | N/A | N/A | 9413 | 9428 | TGCCTAAGTAGGGAGA | 78 | 378 |
| 1063924 | N/A | N/A | 9644 | 9659 | AGGCTACGGTCTTCCC | 68 | 379 |
| 1063956 | N/A | N/A | 9960 | 9975 | AGAGGGTTTGTAAGTA | 155 | 380 |
| 1063988 | N/A | N/A | 10527 | 10542 | ATAAATTACCACCAGC | 55 | 381 |
| 1064020 | N/A | N/A | 10757 | 10772 | TTTCAAAGCAAGGACG | 113 | 382 |
| 1064052 | N/A | N/A | 11379 | 11394 | ATGGAGCTCCTTTGCA | 219 | 383 |
| 1064084 | N/A | N/A | 11550 | 11565 | AGGCATGGCCCCAATC | 109 | 384 |
| 1064118 | N/A | N/A | 11622 | 11637 | GCTCCTGGAATTACTT | 38 | 385 |
| 1064150 | N/A | N/A | 11717 | 11732 | GCTAAGCCCACAGGCC | 215 | 386 |
| 1064182 | N/A | N/A | 11803 | 11818 | TGAAAAGAAGCGGAGT | 98 | 387 |
| 1064214 | N/A | N/A | 11910 | 11925 | CGTCAACACCCGTGTC | 93 | 388 |
| 1064246 | N/A | N/A | 11978 | 11993 | GCAGGACCTCCTAGCT | 203 | 389 |
| 1064278 | N/A | N/A | 12199 | 12214 | GGAATGGAGGAACCCA | 256 | 390 |
| 1064310 | N/A | N/A | 12384 | 12399 | TCCAGGAGAGGGTTAG | 123 | 391 |
| 1064342 | N/A | N/A | 12578 | 12593 | ATCAAATGGGTGTTAC | 102 | 392 |
| 1064374 | N/A | N/A | 12781 | 12796 | AGTCAGCGATGATGAT | 64 | 393 |
| 1064406 | N/A | N/A | 12924 | 12939 | GAATTATCGAGTATCT | 57 | 394 |
| 1064438 | N/A | N/A | 13217 | 13232 | AAGGGATCAGGACTGA | 188 | 395 |

TABLE 6
Inhibition of Foxp3 mRNA by 3-10-3 cEt gapmers targeting
SEQ ID NO.: 1, and 2

| | SEQ ID | SEQ ID | SEQ ID | SEQ ID | | | |
|---|---|---|---|---|---|---|---|
| | NO: 1 | NO: 1 | NO: 2 | NO: 2 | | FOXP3 | SEQ |
| Compound | Start | Stop | Start | Stop | | (% | ID |
| Number | Site | Site | Site | Site | Sequence (5′ to 3′) | UTC) | NO |
| 911144 | N/A | N/A | 7355 | 7370 | TGCTATGATCATCCCC | 60 | 65 |
| 1062006 | 2 | 17 | 402 | 417 | TTTCGATGAGTGTGTG | 38 | 396 |
| 1062038 | 119 | 134 | 519 | 534 | CCTGGCTTGTGGGAAA | 67 | 397 |
| 1062070 | 311 | 326 | 6849 | 6864 | CTGGAAGGTTCCCCCT | 109 | 398 |
| 1062102 | 424 | 439 | 7489 | 7504 | GCCCCGGAGGGTGCCA | 202 | 399 |
| 1062134 | 595 | 610 | 7758 | 7773 | AAGACCCCAGTGGCGG | 47 | 400 |
| 1062166 | 754 | 769 | 8400 | 8415 | AGCAGTGGGTAGGAGC | 77 | 401 |
| 1062198 | 876 | 891 | 9466 | 9481 | GGAGGAGACATTGTGC | 119 | 402 |
| 1062230 | 1050 | 1065 | 11206 | 11221 | GGACGACAGGGCCTTG | 164 | 403 |
| 1062262 | 1183 | 1198 | 12053 | 12068 | CGCATGTTGTGGAACT | 27* | 404 |
| 1062294 | 1426 | 1441 | 13836 | 13851 | CTCCGTTTCTTGCGGA | 136 | 405 |
| 1062326 | 1593 | 1608 | 14003 | 14018 | CAGTGGAAACCTCACT | 117 | 406 |
| 1062358 | 1852 | 1867 | 14262 | 14277 | GAGGGACAGGATTGTG | 134 | 407 |
| 1062390 | 2028 | 2043 | 14438 | 14453 | GGGCACACCCCTGTGT | 194 | 408 |
| 1062422 | 2209 | 2224 | 14619 | 14634 | TTGGCAAGGCAGTGTG | 20 | 409 |
| 1062454 | N/A | N/A | 8299 | 8314 | CACTGACCTGTCCTTC | 117 | 410 |
| 1062486 | N/A | N/A | 13601 | 13616 | CTGCGATGGCACTTGA | 115 | 411 |
| 1062550 | N/A | N/A | 685 | 700 | TTACCTGGCTGGAATC | 91 | 412 |
| 1062582 | N/A | N/A | 867 | 882 | GACAGCATTTCAAGTT | 139 | 413 |
| 1062614 | N/A | N/A | 1109 | 1124 | AGATCGATGGAGTGTG | 107 | 414 |
| 1062646 | N/A | N/A | 1238 | 1253 | AAATGTAAAGGTCCTC | 28 | 415 |
| 1062679 | N/A | N/A | 1338 | 1353 | TAAAGCGATACAAGCA | 100 | 416 |
| 1062711 | N/A | N/A | 1476 | 1491 | CAGCCCTGAACAACCT | 83 | 417 |
| 1062743 | N/A | N/A | 1723 | 1738 | ATCGGCACTTGGTCAA | 63 | 418 |
| 1062775 | N/A | N/A | 1878 | 1893 | AATAGGACAACCTTTT | 143 | 419 |
| 1062807 | N/A | N/A | 2075 | 2090 | CCTATTAGGAGTAAGG | 140 | 420 |
| 1062839 | N/A | N/A | 2160 | 2175 | ATATATGTAATGGCTG | 31 | 421 |
| 1062871 | N/A | N/A | 2392 | 2407 | ACCTCTATAGTAAATG | 67 | 422 |
| 1062903 | N/A | N/A | 2609 | 2624 | GGTTTATTGTGTGTCA | 14 | 423 |
| 1062935 | N/A | N/A | 2732 | 2747 | GAATAGTCAGTCCATT | 54 | 424 |
| 1062967 | N/A | N/A | 2868 | 2883 | TAGAAAGCTTGGACAT | 156 | 425 |
| 1062999 | N/A | N/A | 3069 | 3084 | GTGCGAGAGGAGGATT | 111 | 426 |
| 1063031 | N/A | N/A | 3245 | 3260 | CATTAGGTGTCTGCAG | 37 | 427 |
| 1063063 | N/A | N/A | 3390 | 3405 | TGAGATCTAGGCTTGG | 41 | 428 |
| 1063095 | N/A | N/A | 3642 | 3657 | CATCACCACGCTCTGG | 110 | 429 |
| 1063127 | N/A | N/A | 3864 | 3879 | CCCAAATACATGGCCA | 77 | 430 |
| 1063159 | N/A | N/A | 4104 | 4119 | GAATCATAGAACAGCA | 20 | 431 |
| 1063191 | N/A | N/A | 4228 | 4243 | TCTGAAGACCTGGCCC | 90 | 432 |
| 1063223 | N/A | N/A | 4406 | 4421 | TGCGCCGGGCTTCATC | 87 | 433 |
| 1063254 | N/A | N/A | 4575 | 4590 | CTGCACTGTCTGTTGG | 176 | 434 |
| 1063286 | N/A | N/A | 4712 | 4727 | CCAGAGCTAAGAATTC | 81 | 435 |
| 1063318 | N/A | N/A | 5083 | 5098 | GGCCTGGGAGAGCACT | 153 | 436 |
| 1063350 | N/A | N/A | 5276 | 5291 | GAGTATAGAAGGGTTC | 68 | 437 |
| 1063382 | N/A | N/A | 5496 | 5511 | TGGAAGGGACTGCCCA | 145 | 438 |
| 1063414 | N/A | N/A | 5656 | 5671 | CCTGTCCAAGCCACGC | 19 | 439 |
| 1063446 | N/A | N/A | 5856 | 5871 | AAGGAGGCGAGTCCAG | 103 | 440 |
| 1063478 | N/A | N/A | 6013 | 6028 | GAAGGACCGAGCTGAC | 163 | 441 |
| 1063510 | N/A | N/A | 6135 | 6150 | AGGCGAGAAGTGGGTA | 53 | 442 |
| 1063542 | N/A | N/A | 6281 | 6296 | CTCCTCGGAGTCCTAT | 95 | 443 |
| 1063574 | N/A | N/A | 6455 | 6470 | GCACCTGGCTTGCCTG | 67 | 444 |
| 1063606 | N/A | N/A | 6981 | 6996 | CGGCACCTGTAGGTCC | 141 | 445 |
| 1063638 | N/A | N/A | 7172 | 7187 | TACAATACGGCCTCCT | 86 | 446 |
| 1063670 | N/A | N/A | 7377 | 7392 | CACTGCAAGCCCACAT | 66 | 447 |
| 1063702 | N/A | N/A | 7803 | 7818 | GCTGAGGTGTTACCAG | 109 | 448 |
| 1063734 | N/A | N/A | 7980 | 7995 | GATTTTGACATTCTGC | 11 | 449 |
| 1063766 | N/A | N/A | 8046 | 8061 | AGCTTAAAGACGGCCA | 147 | 450 |
| 1063797 | N/A | N/A | 8560 | 8575 | TACTTATTGGGATGAA | 75 | 451 |
| 1063829 | N/A | N/A | 8850 | 8865 | GAGTAGCAGGGCAAAG | 183 | 452 |
| 1063861 | N/A | N/A | 9052 | 9067 | CTAAGGGTTGTGTGTA | 235 | 453 |
| 1063893 | N/A | N/A | 9414 | 9429 | GTGCCTAAGTAGGGAG | 105 | 454 |
| 1063925 | N/A | N/A | 9645 | 9660 | CAGGCTACGGTCTTCC | 62 | 455 |
| 1063957 | N/A | N/A | 9961 | 9976 | CAGAGGGTTTGTAAGT | 102 | 456 |
| 1063989 | N/A | N/A | 10541 | 10556 | TCGCATCATGAGAAAT | 82 | 457 |
| 1064021 | N/A | N/A | 11113 | 11128 | GCTTAAACTTCCCACT | 106 | 458 |
| 1064053 | N/A | N/A | 11380 | 11395 | CATGGAGCTCCTTTGC | 182 | 459 |
| 1064085 | N/A | N/A | 11551 | 11566 | GAGGCATGGCCCCAAT | 211 | 460 |
| 1064119 | N/A | N/A | 11633 | 11648 | GGAAAGGAGGTGCTCC | 92 | 461 |
| 1064151 | N/A | N/A | 11719 | 11734 | CTGCTAAGCCCACAGG | 140 | 462 |
| 1064183 | N/A | N/A | 11804 | 11819 | TTGAAAAGAAGCGGAG | 141 | 463 |
| 1064215 | N/A | N/A | 11913 | 11928 | CACCGTCAACACCCGT | 63 | 464 |
| 1064247 | N/A | N/A | 11980 | 11995 | ATGCAGGACCTCCTAG | 244 | 465 |
| 1064279 | N/A | N/A | 12200 | 12215 | GGGAATGGAGGAACCC | 112 | 466 |
| 1064311 | N/A | N/A | 12385 | 12400 | GTCCAGGAGAGGGTTA | 241 | 467 |
| 1064343 | N/A | N/A | 12579 | 12594 | GATCAAATGGGTGTTA | 84 | 468 |
| 1064375 | N/A | N/A | 12784 | 12799 | CAGAGTCAGCGATGAT | 77 | 469 |
| 1064407 | N/A | N/A | 12925 | 12940 | TGAATTATCGAGTATC | 53 | 470 |
| 1064439 | N/A | N/A | 13219 | 13234 | GTAAGGGATCAGGACT | 136 | 471 |

TABLE 7
Inhibition of Foxp3 mRNA by 3-10-3 cEt gapmers targeting
SEQ ID NO.: 1, and 2

| | SEQ ID | SEQ ID | SEQ ID | SEQ ID | | | |
|---|---|---|---|---|---|---|---|
| | NO: 1 | NO: 1 | NO: 2 | NO: 2 | | FOXP3 | SEQ |
| Compound | Start | Stop | Start | Stop | | (% | ID |
| Number | Site | Site | Site | Site | Sequence (5′ to 3′) | UTC) | NO |
| 911144 | N/A | N/A | 7355 | 7370 | TGCTATGATCATCCCC | 20 | 65 |
| 1062008 | 4 | 19 | 404 | 419 | TTTTTCGATGAGTGTG | 9 | 472 |
| 1062040 | 128 | 143 | 528 | 543 | AAGGATCAGCCTGGCT | 67 | 473 |
| 1062072 | 313 | 328 | 6851 | 6866 | CCCTGGAAGGTTCCCC | 49 | 474 |
| 1062104 | 459 | 474 | 7524 | 7539 | GGAGTGCCTGTAAGTG | 13 | 475 |
| 1062136 | 597 | 612 | 7760 | 7775 | AGAAGACCCCAGTGGC | 47 | 476 |
| 1062168 | 766 | 781 | 8412 | 8427 | ACACCATTTGCCAGCA | 59 | 477 |
| 1062200 | 878 | 893 | 9468 | 9483 | CTGGAGGAGACATTGT | 62 | 478 |
| 1062232 | 1091 | 1106 | 11247 | 11262 | AAACAGGCTGTCAGGG | 101 | 479 |
| 1062264 | 1185 | 1200 | 12055 | 12070 | GTCGCATGTTGTGGAA | 10* | 480 |
| 1062296 | 1430 | 1445 | 13840 | 13855 | CTGGCTCCGTTTCTTG | 130 | 481 |
| 1062328 | 1595 | 1610 | 14005 | 14020 | GACAGTGGAAACCTCA | 15 | 482 |
| 1062360 | 1854 | 1869 | 14264 | 14279 | GTGAGGGACAGGATTG | 58 | 483 |
| 1062392 | 2040 | 2055 | 14450 | 14465 | GTGTAGGCCTCTGGGC | 45 | 484 |
| 1062424 | 2212 | 2227 | 14622 | 14637 | TTTTTGGCAAGGCAGT | 61 | 485 |
| 1062456 | N/A | N/A | 8301 | 8316 | TCCACTGACCTGTCCT | 73 | 486 |
| 1062488 | N/A | N/A | 13603 | 13618 | AGCTGCGATGGCACTT | 116 | 487 |
| 1062520 | N/A | N/A | 553 | 568 | ACCTTGGTGAAGTGGA | 63 | 488 |
| 1062552 | N/A | N/A | 687 | 702 | CCTTACCTGGCTGGAA | 187 | 489 |
| 1062584 | N/A | N/A | 879 | 894 | CAGTTGCACCTGGACA | 111 | 490 |
| 1062616 | N/A | N/A | 1111 | 1126 | GGAGATCGATGGAGTG | 37 | 491 |
| 1062648 | N/A | N/A | 1259 | 1274 | GAACTGATGCTCACTC | 26 | 492 |
| 1062681 | N/A | N/A | 1340 | 1355 | TCTAAAGCGATACAAG | 97 | 493 |
| 1062713 | N/A | N/A | 1490 | 1505 | AATCGAGCTCACCCCA | 76 | 494 |
| 1062745 | N/A | N/A | 1726 | 1741 | ACAATCGGCACTTGGT | 34 | 495 |
| 1062777 | N/A | N/A | 1886 | 1901 | GAGCATAAAATAGGAC | 57 | 496 |
| 1062809 | N/A | N/A | 2077 | 2092 | ACCCTATTAGGAGTAA | 144 | 497 |
| 1062841 | N/A | N/A | 2234 | 2249 | CATCATAAGCATCACA | 19 | 498 |
| 1062873 | N/A | N/A | 2396 | 2411 | CTTAACCTCTATAGTA | 51 | 499 |
| 1062905 | N/A | N/A | 2616 | 2631 | GATCTTGGGTTTATTG | 81 | 500 |
| 1062937 | N/A | N/A | 2735 | 2750 | AGTGAATAGTCAGTCC | 17 | 501 |
| 1062969 | N/A | N/A | 2905 | 2920 | CCTGGTATAAGAACAG | 23 | 502 |
| 1063001 | N/A | N/A | 3100 | 3115 | GGACACATGCATGGAG | 73 | 503 |
| 1063033 | N/A | N/A | 3248 | 3263 | AGTCATTAGGTGTCTG | 23 | 504 |
| 1063065 | N/A | N/A | 3392 | 3407 | CCTGAGATCTAGGCTT | 48 | 505 |
| 1063097 | N/A | N/A | 3658 | 3673 | ACTGACATGCCTCCAT | 54 | 506 |
| 1063129 | N/A | N/A | 3884 | 3899 | GTCCACTCTGGAACAA | 91 | 507 |
| 1063161 | N/A | N/A | 4123 | 4138 | GTATAACACCAGGACC | 63 | 508 |
| 1063193 | N/A | N/A | 4236 | 4251 | CCCCTAGCTCTGAAGA | 69 | 509 |
| 1063225 | N/A | N/A | 4414 | 4429 | CGGCCGGATGCGCCGG | 120 | 510 |
| 1063256 | N/A | N/A | 4584 | 4599 | GCCGGCTTCCTGCACT | 100 | 511 |
| 1063288 | N/A | N/A | 4714 | 4729 | GGCCAGAGCTAAGAAT | 71 | 512 |
| 1063320 | N/A | N/A | 5094 | 5109 | CTCCGAACAAGGGCCT | 30 | 513 |
| 1063352 | N/A | N/A | 5313 | 5328 | CTGAGTTGGGCACACA | 58 | 514 |
| 1063384 | N/A | N/A | 5521 | 5536 | TCCTGGTCTGAGAGGA | 76 | 515 |
| 1063416 | N/A | N/A | 5686 | 5701 | GCCTCAAATGCCCACT | 61 | 516 |
| 1063448 | N/A | N/A | 5858 | 5873 | GCAAGGAGGCGAGTCC | 55 | 517 |
| 1063480 | N/A | N/A | 6015 | 6030 | TGGAAGGACCGAGCTG | 101 | 518 |
| 1063512 | N/A | N/A | 6139 | 6154 | GAGAAGGCGAGAAGTG | 150 | 519 |
| 1063544 | N/A | N/A | 6293 | 6308 | GTCTCGGACTTTCTCC | 57 | 520 |
| 1063576 | N/A | N/A | 6483 | 6498 | CCACACATGCCCCACG | 102 | 521 |
| 1063608 | N/A | N/A | 6983 | 6998 | GTCGGCACCTGTAGGT | 50 | 522 |
| 1063640 | N/A | N/A | 7175 | 7190 | GACTACAATACGGCCT | 52 | 523 |
| 1063672 | N/A | N/A | 7382 | 7397 | CTCTGCACTGCAAGCC | 30 | 524 |
| 1063704 | N/A | N/A | 7867 | 7882 | AGCCTACACTGCTCAC | 60 | 525 |
| 1063736 | N/A | N/A | 8001 | 8016 | TGTAAAGCTCTGTGGT | 43 | 526 |
| 1063768 | N/A | N/A | 8048 | 8063 | GAAGCTTAAAGACGGC | 42 | 527 |
| 1063799 | N/A | N/A | 8563 | 8578 | TACTACTTATTGGGAT | 52 | 528 |
| 1063831 | N/A | N/A | 8852 | 8867 | AGGAGTAGCAGGGCAA | 60 | 529 |
| 1063863 | N/A | N/A | 9054 | 9069 | TGCTAAGGGTTGTGTG | 37 | 530 |
| 1063895 | N/A | N/A | 9425 | 9440 | TCCGCCTGGCAGTGCC | 40 | 531 |
| 1063927 | N/A | N/A | 9687 | 9702 | ACATGAGGCCTCAGCC | 91 | 532 |
| 1063959 | N/A | N/A | 9963 | 9978 | GTCAGAGGGTTTGTAA | 64 | 533 |
| 1063991 | N/A | N/A | 10543 | 10558 | ATTCGCATCATGAGAA | 33 | 534 |
| 1064023 | N/A | N/A | 11115 | 11130 | AGGCTTAAACTTCCCA | 60 | 535 |
| 1064055 | N/A | N/A | 11383 | 11398 | CAGCATGGAGCTCCTT | 27 | 536 |
| 1064087 | N/A | N/A | 11554 | 11569 | GGTGAGGCATGGCCCC | 57 | 537 |
| 1064121 | N/A | N/A | 11653 | 11668 | GATTTTCCTTGGTCAG | 119 | 538 |
| 1064153 | N/A | N/A | 11728 | 11743 | CTCTGATCCCTGCTAA | 84 | 539 |
| 1064185 | N/A | N/A | 11810 | 11825 | CCGAGGTTGAAAAGAA | 87 | 540 |
| 1064217 | N/A | N/A | 11919 | 11934 | AGATCTCACCGTCAAC | 107 | 541 |
| 1064249 | N/A | N/A | 11984 | 11999 | CCCCATGCAGGACCTC | 129 | 542 |
| 1064281 | N/A | N/A | 12202 | 12217 | TTGGGAATGGAGGAAC | 106 | 543 |
| 1064313 | N/A | N/A | 12396 | 12411 | CTATTTTATGGGTCCA | 14 | 544 |
| 1064345 | N/A | N/A | 12584 | 12599 | TTAAGGATCAAATGGG | 74 | 545 |
| 1064377 | N/A | N/A | 12786 | 12801 | TACAGAGTCAGCGATG | 60 | 546 |
| 1064409 | N/A | N/A | 12927 | 12942 | TTTGAATTATCGAGTA | 66 | 547 |
| 1064441 | N/A | N/A | 13221 | 13236 | AGGTAAGGGATCAGGA | 83 | 548 |

TABLE 8
Inhibition of Foxp3 mRNA by 3-10-3 cEt gapmers targeting
SEQ ID NO.: 1, and 2

| | SEQ ID | SEQ ID | SEQ ID | SEQ ID | | | |
|---|---|---|---|---|---|---|---|
| | NO: 1 | NO: 1 | NO: 2 | NO: 2 | | FOXP3 | SEQ |
| Compound | Start | Stop | Start | Stop | | (% | ID |
| Number | Site | Site | Site | Site | Sequence (5′ to 3′) | UTC) | NO |
| 911144 | N/A | N/A | 7355 | 7370 | TGCTATGATCATCCCC | 24 | 65 |
| 1062009 | 5 | 20 | 405 | 420 | TTTTTTCGATGAGTGT | 29 | 549 |
| 1062041 | 143 | 158 | 543 | 558 | AGTGGACTGACAGAAA | 39 | 550 |
| 1062073 | 314 | 329 | 6852 | 6867 | GCCCTGGAAGGTTCCC | 114 | 551 |
| 1062105 | 461 | 476 | 7526 | 7541 | GAGGAGTGCCTGTAAG | 61 | 552 |
| 1062137 | 600 | 615 | 7763 | 7778 | GGGAGAAGACCCCAGT | 86 | 553 |
| 1062169 | 771 | 786 | 8417 | 8432 | TGCAGACACCATTTGC | 75 | 554 |
| 1062201 | 895 | 910 | 9485 | 9500 | GACTGTACCATCTCTC | 87 | 555 |
| 1062233 | 1098 | 1113 | 11254 | 11269 | GGACAGCAAACAGGCT | 87 | 556 |
| 1062265 | 1186 | 1201 | 12056 | 12071 | GGTCGCATGTTGTGGA | 10* | 557 |
| 1062297 | 1433 | 1448 | 13843 | 13858 | CCTCTGGCTCCGTTTC | 95 | 558 |
| 1062329 | 1596 | 1611 | 14006 | 14021 | AGACAGTGGAAACCTC | 85 | 559 |
| 1062361 | 1856 | 1871 | 14266 | 14281 | GAGTGAGGGACAGGAT | 16 | 560 |
| 1062393 | 2041 | 2056 | 14451 | 14466 | TGTGTAGGCCTCTGGG | 23 | 561 |
| 1062425 | 2215 | 2230 | 14625 | 14640 | GTATTTTTGGCAAGGC | 19 | 562 |
| 1062457 | N/A | N/A | 8304 | 8319 | CTGTCCACTGACCTGT | 39 | 563 |
| 1062489 | N/A | N/A | 13609 | 13624 | ACTTTGAGCTGCGATG | 64 | 564 |
| 1062521 | N/A | N/A | 554 | 569 | CACCTTGGTGAAGTGG | 70 | 565 |
| 1062553 | N/A | N/A | 688 | 703 | ACCTTACCTGGCTGGA | 58 | 566 |
| 1062585 | N/A | N/A | 880 | 895 | TCAGTTGCACCTGGAC | 48 | 567 |
| 1062617 | N/A | N/A | 1112 | 1127 | AGGAGATCGATGGAGT | 67 | 568 |
| 1062649 | N/A | N/A | 1260 | 1275 | AGAACTGATGCTCACT | 41 | 569 |
| 1062682 | N/A | N/A | 1341 | 1356 | CTCTAAAGCGATACAA | 94 | 570 |
| 1062714 | N/A | N/A | 1491 | 1506 | GAATCGAGCTCACCCC | 56 | 571 |
| 1062746 | N/A | N/A | 1727 | 1742 | AACAATCGGCACTTGG | 31 | 572 |
| 1062778 | N/A | N/A | 1887 | 1902 | GGAGCATAAAATAGGA | 116 | 573 |
| 1062810 | N/A | N/A | 2078 | 2093 | CACCCTATTAGGAGTA | 94 | 574 |
| 1062842 | N/A | N/A | 2235 | 2250 | CCATCATAAGCATCAC | 24 | 575 |
| 1062874 | N/A | N/A | 2397 | 2412 | TCTTAACCTCTATAGT | 46 | 576 |
| 1062906 | N/A | N/A | 2618 | 2633 | CTGATCTTGGGTTTAT | 63 | 577 |
| 1062938 | N/A | N/A | 2736 | 2751 | GAGTGAATAGTCAGTC | 10 | 578 |
| 1062970 | N/A | N/A | 2920 | 2935 | GCAAAACAGTGTGGCC | 65 | 579 |
| 1063002 | N/A | N/A | 3125 | 3140 | GATAGTGAGAGACATT | 98 | 580 |
| 1063034 | N/A | N/A | 3249 | 3264 | AAGTCATTAGGTGTCT | 28 | 581 |
| 1063066 | N/A | N/A | 3393 | 3408 | TCCTGAGATCTAGGCT | 83 | 582 |
| 1063098 | N/A | N/A | 3666 | 3681 | CCTGACTGACTGACAT | 113 | 583 |
| 1063130 | N/A | N/A | 3886 | 3901 | CTGTCCACTCTGGAAC | 69 | 584 |
| 1063162 | N/A | N/A | 4124 | 4139 | AGTATAACACCAGGAC | 36 | 585 |
| 1063194 | N/A | N/A | 4243 | 4258 | TGACAAGCCCCTAGCT | 112 | 586 |
| 1063226 | N/A | N/A | 4418 | 4433 | ATGGCGGCCGGATGCG | 147 | 587 |
| 1063257 | N/A | N/A | 4586 | 4601 | CAGCCGGCTTCCTGCA | 122 | 588 |
| 1063289 | N/A | N/A | 4719 | 4734 | CACTTGGCCAGAGCTA | 29 | 589 |
| 1063321 | N/A | N/A | 5095 | 5110 | GCTCCGAACAAGGGCC | 59 | 590 |
| 1063353 | N/A | N/A | 5314 | 5329 | ACTGAGTTGGGCACAC | 63 | 591 |
| 1063385 | N/A | N/A | 5522 | 5537 | ATCCTGGTCTGAGAGG | 52 | 592 |
| 1063417 | N/A | N/A | 5727 | 5742 | CCAATTTCTGGCCCTC | 51 | 593 |
| 1063449 | N/A | N/A | 5859 | 5874 | GGCAAGGAGGCGAGTC | 29 | 594 |
| 1063481 | N/A | N/A | 6016 | 6031 | CTGGAAGGACCGAGCT | 80 | 595 |
| 1063513 | N/A | N/A | 6140 | 6155 | GGAGAAGGCGAGAAGT | 46 | 596 |
| 1063545 | N/A | N/A | 6303 | 6318 | GCCGGAGCTGGTCTCG | 85 | 597 |
| 1063577 | N/A | N/A | 6563 | 6578 | CCATAGTTGCACCCCA | 37 | 598 |
| 1063609 | N/A | N/A | 6985 | 7000 | AGGTCGGCACCTGTAG | 56 | 599 |
| 1063641 | N/A | N/A | 7176 | 7191 | GGACTACAATACGGCC | 47 | 600 |
| 1063673 | N/A | N/A | 7387 | 7402 | AAATACTCTGCACTGC | 101 | 601 |
| 1063705 | N/A | N/A | 7868 | 7883 | TAGCCTACACTGCTCA | 72 | 602 |
| 1063737 | N/A | N/A | 8006 | 8021 | AGCTTTGTAAAGCTCT | 30 | 603 |
| 1063769 | N/A | N/A | 8049 | 8064 | AGAAGCTTAAAGACGG | 68 | 604 |
| 1063800 | N/A | N/A | 8564 | 8579 | TTACTACTTATTGGGA | 124 | 605 |
| 1063832 | N/A | N/A | 8854 | 8869 | TGAGGAGTAGCAGGGC | 47 | 606 |
| 1063864 | N/A | N/A | 9055 | 9070 | CTGCTAAGGGTTGTGT | 88 | 607 |
| 1063896 | N/A | N/A | 9503 | 9518 | ATTACCTGCTGCTCCA | 72 | 608 |
| 1063928 | N/A | N/A | 9688 | 9703 | AACATGAGGCCTCAGC | 80 | 609 |
| 1063960 | N/A | N/A | 10283 | 10298 | TCTTAGAGTCAGAGGG | 30 | 610 |
| 1063992 | N/A | N/A | 10545 | 10560 | ACATTCGCATCATGAG | 60 | 611 |
| 1064024 | N/A | N/A | 11116 | 11131 | GAGGCTTAAACTTCCC | 34 | 612 |
| 1064056 | N/A | N/A | 11386 | 11401 | GGGCAGCATGGAGCTC | 83 | 613 |
| 1064088 | N/A | N/A | 11560 | 11575 | AGAGTGGGTGAGGCAT | 94 | 614 |
| 1064122 | N/A | N/A | 11654 | 11669 | CGATTTTCCTTGGTCA | 26 | 615 |
| 1064154 | N/A | N/A | 11729 | 11744 | TCTCTGATCCCTGCTA | 94 | 616 |
| 1064186 | N/A | N/A | 11811 | 11826 | CCCGAGGTTGAAAAGA | 63 | 617 |
| 1064218 | N/A | N/A | 11920 | 11935 | GAGATCTCACCGTCAA | 69 | 618 |
| 1064250 | N/A | N/A | 11987 | 12002 | AAGCCCCATGCAGGAC | 80 | 619 |
| 1064282 | N/A | N/A | 12240 | 12255 | CATTTGAGGCACGGCT | 105 | 620 |
| 1064314 | N/A | N/A | 12399 | 12414 | AGGCTATTTTATGGGT | 70 | 621 |
| 1064346 | N/A | N/A | 12585 | 12600 | GTTAAGGATCAAATGG | 78 | 622 |
| 1064378 | N/A | N/A | 12787 | 12802 | TTACAGAGTCAGCGAT | 105 | 623 |
| 1064410 | N/A | N/A | 12936 | 12951 | CAGAGATGGTTTGAAT | 75 | 624 |
| 1064442 | N/A | N/A | 13222 | 13237 | TAGGTAAGGGATCAGG | 76 | 625 |

### Example 2: Antisense Inhibition of Human Foxp3 in SUP-M2 Cells by cEt Gapmers

[0401] Modified oligonucleotides were designed to target a Foxp3 nucleic acid and were tested for their effect on Foxp3 mRNA level in vitro. The modified oligonucleotides were tested in a series of experiments that had similar culture conditions. The results for each experiment are presented in separate tables shown below. Cultured SUP-M2 cells at a density of 60,000 cells per well were treated using free uptake with 3,000 nM of modified oligonucleotide. After a treatment period of approximately 24 hours, RNA was isolated from the cells and Foxp3 mRNA levels were measured by quantitative real-time RTPCR. Human primer probe set RTS35925 was used to measure mRNA levels. Foxp3 mRNA levels were adjusted according to total RNA content, as measured by RIBOGREEN®. Results are presented in the tables below as percent control of the amount of Foxp3 mRNA relative to untreated control cells (% UTC). The modified oligonucleotides with percent control values marked with an asterisk (*) target the amplicon region of the primer probe set. Additional assays may be used to measure the potency and efficacy of the modified oligonucleotides targeting the amplicon region.

[0402] The newly designed modified oligonucleotides in the Tables below were designed as 3-10-3 cEt gapmers. The gapmers are 16 nucleosides in length, wherein the central gap segment comprises of ten 2′-deoxynucleosides and is flanked by wing segments on the 5′ direction and the 3′ direction comprising three nucleosides each. Each nucleoside in the 5′ wing segment and each nucleoside in the 3′ wing segment has a cEt sugar modification. The internucleoside linkages throughout each gapmer are phosphorothioate (P═S) linkages. All cytosine residues throughout each gapmer are 5-methylcytosines. “Start site” indicates the 5′-most nucleoside to which the gapmer is targeted in the human gene sequence. “Stop site” indicates the 3′-most nucleoside to which the gapmer is targeted human gene sequence. Each gapmer listed in the Tables below is targeted to either SEQ ID NO.: 1 or SEQ ID NO.: 2. ‘N/A’ indicates that the modified oligonucleotide does not target that particular gene sequence with 100% complementarity. ‘N. D.’ indicates that the % UTC is not defined for that specific modified oligonucleotide in that specific experiment. Activity of that modified oligonucleotide may be defined in a different experiment.

TABLE 9
Inhibition of Foxp3 mRNA by 3-10-3 cEt gapmers targeting
SEQ ID NO.: 1, and 2

| | SEQ ID | SEQ ID | SEQ ID | SEQ ID | | | |
|---|---|---|---|---|---|---|---|
| | NO: 1 | NO: 1 | NO: 2 | NO: 2 | | FOXP3 | SEQ |
| Compound | Start | Stop | Start | Stop | | (% | ID |
| Number | Site | Site | Site | Site | Sequence (5′ to 3′) | UTC) | NO |
| 910956 | 1800 | 1815 | 14210 | 14225 | AGTAATCTGTGCGAGC | 21 | 250 |
| 911144 | N/A | N/A | 7355 | 7370 | TGCTATGATCATCCCC | 37 | 65 |
| 1062005 | 1 | 16 | 401 | 416 | TTCGATGAGTGTGTGC | 20 | 320 |
| 1062037 | 118 | 133 | 518 | 533 | CTGGCTTGTGGGAAAC | 63 | 321 |
| 1062069 | 310 | 325 | 6848 | 6863 | TGGAAGGTTCCCCCTG | 142 | 322 |
| 1062101 | 422 | 437 | 7487 | 7502 | CCCGGAGGGTGCCACC | 135 | 323 |
| 1062133 | 594 | 609 | 7757 | 7772 | AGACCCCAGTGGCGGT | 85 | 324 |
| 1062165 | 752 | 767 | 8398 | 8413 | CAGTGGGTAGGAGCTC | 66 | 325 |
| 1062197 | 869 | 884 | 9459 | 9474 | ACATTGTGCCCTGCCC | 101 | 326 |
| 1062229 | 1049 | 1064 | 11205 | 11220 | GACGACAGGGCCTTGG | 78 | 327 |
| 1062261 | 1181 | 1196 | 12051 | 12066 | CATGTTGTGGAACTTG | 111* | 328 |
| 1062293 | 1423 | 1438 | 13833 | 13848 | CGTTTCTTGCGGAACT | 105 | 329 |
| 1062325 | 1592 | 1607 | 14002 | 14017 | AGTGGAAACCTCACTT | 67 | 330 |
| 1062357 | 1848 | 1863 | 14258 | 14273 | GACAGGATTGTGACAT | 101 | 331 |
| 1062389 | 2026 | 2041 | 14436 | 14451 | GCACACCCCTGTGTTG | 84 | 332 |
| 1062421 | 2208 | 2223 | 14618 | 14633 | TGGCAAGGCAGTGTGT | 66 | 333 |
| 1062453 | N/A | N/A | 8298 | 8313 | ACTGACCTGTCCTTCC | 133 | 334 |
| 1062485 | N/A | N/A | 13599 | 13614 | GCGATGGCACTTGAGG | 68 | 335 |
| 1062517 | N/A | N/A | N/A | N/A | GGCGAGGCTCCTGAGA | 92 | 626 |
| 1062549 | N/A | N/A | 684 | 699 | TACCTGGCTGGAATCA | 101 | 336 |
| 1062581 | N/A | N/A | 866 | 881 | ACAGCATTTCAAGTTG | 132 | 337 |
| 1062613 | N/A | N/A | 1108 | 1123 | GATCGATGGAGTGTGG | 65 | 338 |
| 1062645 | N/A | N/A | 1237 | 1252 | AATGTAAAGGTCCTCG | 27 | 339 |
| 1062678 | N/A | N/A | 1337 | 1352 | AAAGCGATACAAGCAA | 87 | 340 |
| 1062710 | N/A | N/A | 1475 | 1490 | AGCCCTGAACAACCTG | 85 | 341 |
| 1062742 | N/A | N/A | 1721 | 1736 | CGGCACTTGGTCAAAT | 96 | 342 |
| 1062774 | N/A | N/A | 1877 | 1892 | ATAGGACAACCTTTTG | 113 | 343 |
| 1062806 | N/A | N/A | 2074 | 2089 | CTATTAGGAGTAAGGA | 70 | 344 |
| 1062838 | N/A | N/A | 2159 | 2174 | TATATGTAATGGCTGA | 25 | 345 |
| 1062870 | N/A | N/A | 2391 | 2406 | CCTCTATAGTAAATGG | 108 | 346 |
| 1062902 | N/A | N/A | 2585 | 2600 | GCTAAGTATTTACTGT | 52 | 347 |
| 1062934 | N/A | N/A | 2731 | 2746 | AATAGTCAGTCCATTA | 78 | 348 |
| 1062966 | N/A | N/A | 2866 | 2881 | GAAAGCTTGGACATGG | 47 | 349 |
| 1062998 | N/A | N/A | 3067 | 3082 | GCGAGAGGAGGATTGC | 103 | 350 |
| 1063030 | N/A | N/A | 3244 | 3259 | ATTAGGTGTCTGCAGG | 45 | 351 |
| 1063062 | N/A | N/A | 3389 | 3404 | GAGATCTAGGCTTGGA | 26 | 352 |
| 1063094 | N/A | N/A | 3641 | 3656 | ATCACCACGCTCTGGC | 38 | 353 |
| 1063126 | N/A | N/A | 3863 | 3878 | CCAAATACATGGCCAC | 73 | 354 |
| 1063158 | N/A | N/A | 4102 | 4117 | ATCATAGAACAGCATT | 26 | 355 |
| 1063190 | N/A | N/A | 4223 | 4238 | AGACCTGGCCCTTCTT | 125 | 356 |
| 1063222 | N/A | N/A | 4402 | 4417 | CCGGGCTTCATCGACA | 108 | 357 |
| 1063253 | N/A | N/A | 4555 | 4570 | TCCCTTTCTGACTGGG | 108 | 358 |
| 1063285 | N/A | N/A | 4710 | 4725 | AGAGCTAAGAATTCTC | 108 | 359 |
| 1063317 | N/A | N/A | 5080 | 5095 | CTGGGAGAGCACTGGT | 111 | 360 |
| 1063349 | N/A | N/A | 5274 | 5289 | GTATAGAAGGGTTCTG | 64 | 361 |
| 1063381 | N/A | N/A | 5482 | 5497 | CAGCCAACCCCATTAT | 139 | 362 |
| 1063413 | N/A | N/A | 5655 | 5670 | CTGTCCAAGCCACGCA | 79 | 363 |
| 1063445 | N/A | N/A | 5855 | 5870 | AGGAGGCGAGTCCAGG | 92 | 364 |
| 1063477 | N/A | N/A | 6012 | 6027 | AAGGACCGAGCTGACA | 53 | 365 |
| 1063509 | N/A | N/A | 6133 | 6148 | GCGAGAAGTGGGTAGA | 47 | 366 |
| 1063541 | N/A | N/A | 6280 | 6295 | TCCTCGGAGTCCTATT | 116 | 367 |
| 1063573 | N/A | N/A | 6449 | 6464 | GGCTTGCCTGCCCACG | 134 | 368 |
| 1063605 | N/A | N/A | 6969 | 6984 | GTCCAGGTACCCCACC | 65 | 369 |
| 1063637 | N/A | N/A | 7171 | 7186 | ACAATACGGCCTCCTC | 92 | 370 |
| 1063669 | N/A | N/A | 7376 | 7391 | ACTGCAAGCCCACATG | 56 | 371 |
| 1063701 | N/A | N/A | 7802 | 7817 | CTGAGGTGTTACCAGG | 78 | 372 |
| 1063733 | N/A | N/A | 7968 | 7983 | CTGCATCTTTAAGGTT | 56 | 373 |
| 1063765 | N/A | N/A | 8045 | 8060 | GCTTAAAGACGGCCAT | 96 | 374 |
| 1063796 | N/A | N/A | 8559 | 8574 | ACTTATTGGGATGAAG | 70 | 375 |
| 1063828 | N/A | N/A | 8848 | 8863 | GTAGCAGGGCAAAGCA | 156 | 376 |
| 1063860 | N/A | N/A | 9051 | 9066 | TAAGGGTTGTGTGTAG | 136 | 377 |
| 1063892 | N/A | N/A | 9413 | 9428 | TGCCTAAGTAGGGAGA | 103 | 378 |
| 1063924 | N/A | N/A | 9644 | 9659 | AGGCTACGGTCTTCCC | 67 | 379 |
| 1063956 | N/A | N/A | 9960 | 9975 | AGAGGGTTTGTAAGTA | 78 | 380 |
| 1063988 | N/A | N/A | 10527 | 10542 | ATAAATTACCACCAGC | 41 | 381 |
| 1064020 | N/A | N/A | 10757 | 10772 | TTTCAAAGCAAGGACG | 81 | 382 |
| 1064052 | N/A | N/A | 11379 | 11394 | ATGGAGCTCCTTTGCA | 89 | 383 |
| 1064084 | N/A | N/A | 11550 | 11565 | AGGCATGGCCCCAATC | 168 | 384 |
| 1064118 | N/A | N/A | 11622 | 11637 | GCTCCTGGAATTACTT | 91 | 385 |
| 1064150 | N/A | N/A | 11717 | 11732 | GCTAAGCCCACAGGCC | 81 | 386 |
| 1064182 | N/A | N/A | 11803 | 11818 | TGAAAAGAAGCGGAGT | 80 | 387 |
| 1064214 | N/A | N/A | 11910 | 11925 | CGTCAACACCCGTGTC | 114 | 388 |
| 1064246 | N/A | N/A | 11978 | 11993 | GCAGGACCTCCTAGCT | 104 | 389 |
| 1064278 | N/A | N/A | 12199 | 12214 | GGAATGGAGGAACCCA | 133 | 390 |
| 1064310 | N/A | N/A | 12384 | 12399 | TCCAGGAGAGGGTTAG | 45 | 391 |
| 1064342 | N/A | N/A | 12578 | 12593 | ATCAAATGGGTGTTAC | 89 | 392 |
| 1064374 | N/A | N/A | 12781 | 12796 | AGTCAGCGATGATGAT | 64 | 393 |
| 1064406 | N/A | N/A | 12924 | 12939 | GAATTATCGAGTATCT | 99 | 394 |
| 1064438 | N/A | N/A | 13217 | 13232 | AAGGGATCAGGACTGA | 112 | 395 |

TABLE 10
Inhibition of Foxp3 mRNA by 3-10-3 cEt gapmers targeting
SEQ ID NO.: 1, and 2

| | SEQ ID | SEQ ID | SEQ ID | SEQ ID | | | |
|---|---|---|---|---|---|---|---|
| | NO: 1 | NO: 1 | NO: 2 | NO: 2 | | FOXP3 | SEQ |
| Compound | Start | Stop | Start | Stop | | (% | ID |
| Number | Site | Site | Site | Site | Sequence (5′ to 3′) | UTC) | NO |
| 910956 | 1800 | 1815 | 14210 | 14225 | AGTAATCTGTGCGAGC | 19 | 250 |
| 911144 | N/A | N/A | 7355 | 7370 | TGCTATGATCATCCCC | 41 | 65 |
| 1062006 | 2 | 17 | 402 | 417 | TTTCGATGAGTGTGTG | 31 | 396 |
| 1062038 | 119 | 134 | 519 | 534 | CCTGGCTTGTGGGAAA | 86 | 397 |
| 1062070 | 311 | 326 | 6849 | 6864 | CTGGAAGGTTCCCCCT | 131 | 398 |
| 1062102 | 424 | 439 | 7489 | 7504 | GCCCCGGAGGGTGCCA | 99 | 399 |
| 1062134 | 595 | 610 | 7758 | 7773 | AAGACCCCAGTGGCGG | 57 | 400 |
| 1062166 | 754 | 769 | 8400 | 8415 | AGCAGTGGGTAGGAGC | 37 | 401 |
| 1062198 | 876 | 891 | 9466 | 9481 | GGAGGAGACATTGTGC | 107 | 402 |
| 1062230 | 1050 | 1065 | 11206 | 11221 | GGACGACAGGGCCTTG | 81 | 403 |
| 1062262 | 1183 | 1198 | 12053 | 12068 | CGCATGTTGTGGAACT | 66* | 404 |
| 1062294 | 1426 | 1441 | 13836 | 13851 | CTCCGTTTCTTGCGGA | 115 | 405 |
| 1062326 | 1593 | 1608 | 14003 | 14018 | CAGTGGAAACCTCACT | 118 | 406 |
| 1062358 | 1852 | 1867 | 14262 | 14277 | GAGGGACAGGATTGTG | 68 | 407 |
| 1062390 | 2028 | 2043 | 14438 | 14453 | GGGCACACCCCTGTGT | 128 | 408 |
| 1062422 | 2209 | 2224 | 14619 | 14634 | TTGGCAAGGCAGTGTG | 19 | 409 |
| 1062454 | N/A | N/A | 8299 | 8314 | CACTGACCTGTCCTTC | 70 | 410 |
| 1062486 | N/A | N/A | 13601 | 13616 | CTGCGATGGCACTTGA | 114 | 411 |
| 1062550 | N/A | N/A | 685 | 700 | TTACCTGGCTGGAATC | 129 | 412 |
| 1062582 | N/A | N/A | 867 | 882 | GACAGCATTTCAAGTT | 42 | 413 |
| 1062614 | N/A | N/A | 1109 | 1124 | AGATCGATGGAGTGTG | 59 | 414 |
| 1062646 | N/A | N/A | 1238 | 1253 | AAATGTAAAGGTCCTC | 40 | 415 |
| 1062679 | N/A | N/A | 1338 | 1353 | TAAAGCGATACAAGCA | 82 | 416 |
| 1062711 | N/A | N/A | 1476 | 1491 | CAGCCCTGAACAACCT | 123 | 417 |
| 1062743 | N/A | N/A | 1723 | 1738 | ATCGGCACTTGGTCAA | 44 | 418 |
| 1062775 | N/A | N/A | 1878 | 1893 | AATAGGACAACCTTTT | 74 | 419 |
| 1062807 | N/A | N/A | 2075 | 2090 | CCTATTAGGAGTAAGG | 127 | 420 |
| 1062839 | N/A | N/A | 2160 | 2175 | ATATATGTAATGGCTG | 24 | 421 |
| 1062871 | N/A | N/A | 2392 | 2407 | ACCTCTATAGTAAATG | 103 | 422 |
| 1062903 | N/A | N/A | 2609 | 2624 | GGTTTATTGTGTGTCA | 5 | 423 |
| 1062935 | N/A | N/A | 2732 | 2747 | GAATAGTCAGTCCATT | 64 | 424 |
| 1062967 | N/A | N/A | 2868 | 2883 | TAGAAAGCTTGGACAT | 100 | 425 |
| 1062999 | N/A | N/A | 3069 | 3084 | GTGCGAGAGGAGGATT | 71 | 426 |
| 1063031 | N/A | N/A | 3245 | 3260 | CATTAGGTGTCTGCAG | 59 | 427 |
| 1063063 | N/A | N/A | 3390 | 3405 | TGAGATCTAGGCTTGG | 23 | 428 |
| 1063095 | N/A | N/A | 3642 | 3657 | CATCACCACGCTCTGG | 117 | 429 |
| 1063127 | N/A | N/A | 3864 | 3879 | CCCAAATACATGGCCA | 40 | 430 |
| 1063159 | N/A | N/A | 4104 | 4119 | GAATCATAGAACAGCA | 39 | 431 |
| 1063191 | N/A | N/A | 4228 | 4243 | TCTGAAGACCTGGCCC | 61 | 432 |
| 1063223 | N/A | N/A | 4406 | 4421 | TGCGCCGGGCTTCATC | 78 | 433 |
| 1063254 | N/A | N/A | 4575 | 4590 | CTGCACTGTCTGTTGG | 93 | 434 |
| 1063286 | N/A | N/A | 4712 | 4727 | CCAGAGCTAAGAATTC | 69 | 435 |
| 1063318 | N/A | N/A | 5083 | 5098 | GGCCTGGGAGAGCACT | 71 | 436 |
| 1063350 | N/A | N/A | 5276 | 5291 | GAGTATAGAAGGGTTC | 70 | 437 |
| 1063382 | N/A | N/A | 5496 | 5511 | TGGAAGGGACTGCCCA | 119 | 438 |
| 1063414 | N/A | N/A | 5656 | 5671 | CCTGTCCAAGCCACGC | 51 | 439 |
| 1063446 | N/A | N/A | 5856 | 5871 | AAGGAGGCGAGTCCAG | 127 | 440 |
| 1063478 | N/A | N/A | 6013 | 6028 | GAAGGACCGAGCTGAC | 104 | 441 |
| 1063510 | N/A | N/A | 6135 | 6150 | AGGCGAGAAGTGGGTA | 43 | 442 |
| 1063542 | N/A | N/A | 6281 | 6296 | CTCCTCGGAGTCCTAT | 33 | 443 |
| 1063574 | N/A | N/A | 6455 | 6470 | GCACCTGGCTTGCCTG | 59 | 444 |
| 1063606 | N/A | N/A | 6981 | 6996 | CGGCACCTGTAGGTCC | 113 | 445 |
| 1063638 | N/A | N/A | 7172 | 7187 | TACAATACGGCCTCCT | 54 | 446 |
| 1063670 | N/A | N/A | 7377 | 7392 | CACTGCAAGCCCACAT | 48 | 447 |
| 1063702 | N/A | N/A | 7803 | 7818 | GCTGAGGTGTTACCAG | 76 | 448 |
| 1063734 | N/A | N/A | 7980 | 7995 | GATTTTGACATTCTGC | 3 | 449 |
| 1063766 | N/A | N/A | 8046 | 8061 | AGCTTAAAGACGGCCA | 116 | 450 |
| 1063797 | N/A | N/A | 8560 | 8575 | TACTTATTGGGATGAA | 42 | 451 |
| 1063829 | N/A | N/A | 8850 | 8865 | GAGTAGCAGGGCAAAG | 112 | 452 |
| 1063861 | N/A | N/A | 9052 | 9067 | CTAAGGGTTGTGTGTA | 69 | 453 |
| 1063893 | N/A | N/A | 9414 | 9429 | GTGCCTAAGTAGGGAG | 48 | 454 |
| 1063925 | N/A | N/A | 9645 | 9660 | CAGGCTACGGTCTTCC | 113 | 455 |
| 1063957 | N/A | N/A | 9961 | 9976 | CAGAGGGTTTGTAAGT | 75 | 456 |
| 1063989 | N/A | N/A | 10541 | 10556 | TCGCATCATGAGAAAT | 58 | 457 |
| 1064021 | N/A | N/A | 11113 | 11128 | GCTTAAACTTCCCACT | 118 | 458 |
| 1064053 | N/A | N/A | 11380 | 11395 | CATGGAGCTCCTTTGC | 122 | 459 |
| 1064085 | N/A | N/A | 11551 | 11566 | GAGGCATGGCCCCAAT | 143 | 460 |
| 1064119 | N/A | N/A | 11633 | 11648 | GGAAAGGAGGTGCTCC | 125 | 461 |
| 1064151 | N/A | N/A | 11719 | 11734 | CTGCTAAGCCCACAGG | 86 | 462 |
| 1064183 | N/A | N/A | 11804 | 11819 | TTGAAAAGAAGCGGAG | 55 | 463 |
| 1064215 | N/A | N/A | 11913 | 11928 | CACCGTCAACACCCGT | 58 | 464 |
| 1064247 | N/A | N/A | 11980 | 11995 | ATGCAGGACCTCCTAG | 131 | 465 |
| 1064279 | N/A | N/A | 12200 | 12215 | GGGAATGGAGGAACCC | 113 | 466 |
| 1064311 | N/A | N/A | 12385 | 12400 | GTCCAGGAGAGGGTTA | 88 | 467 |
| 1064343 | N/A | N/A | 12579 | 12594 | GATCAAATGGGTGTTA | 81 | 468 |
| 1064375 | N/A | N/A | 12784 | 12799 | CAGAGTCAGCGATGAT | 98 | 469 |
| 1064407 | N/A | N/A | 12925 | 12940 | TGAATTATCGAGTATC | 86 | 470 |
| 1064439 | N/A | N/A | 13219 | 13234 | GTAAGGGATCAGGACT | 66 | 471 |

TABLE 11
Inhibition of Foxp3 mRNA by 3-10-3 cEt gapmers targeting
SEQ ID NO.: 1, and 2

| | SEQ ID | SEQ ID | SEQ ID | SEQ ID | | | |
|---|---|---|---|---|---|---|---|
| | NO: 1 | NO: 1 | NO: 2 | NO: 2 | | FOXP3 | SEQ |
| Compound | Start | Stop | Start | Stop | | (% | ID |
| Number | Site | Site | Site | Site | Sequence (5′ to 3′) | UTC) | NO |
| 910956 | 1800 | 1815 | 14210 | 14225 | AGTAATCTGTGCGAGC | 18 | 250 |
| 911144 | N/A | N/A | 7355 | 7370 | TGCTATGATCATCCCC | 36 | 65 |
| 1062008 | 4 | 19 | 404 | 419 | TTTTTCGATGAGTGTG | 13 | 472 |
| 1062040 | 128 | 143 | 528 | 543 | AAGGATCAGCCTGGCT | 111 | 473 |
| 1062072 | 313 | 328 | 6851 | 6866 | CCCTGGAAGGTTCCCC | 92 | 474 |
| 1062104 | 459 | 474 | 7524 | 7539 | GGAGTGCCTGTAAGTG | 78 | 475 |
| 1062136 | 597 | 612 | 7760 | 7775 | AGAAGACCCCAGTGGC | 98 | 476 |
| 1062168 | 766 | 781 | 8412 | 8427 | ACACCATTTGCCAGCA | 119 | 477 |
| 1062200 | 878 | 893 | 9468 | 9483 | CTGGAGGAGACATTGT | 64 | 478 |
| 1062232 | 1091 | 1106 | 11247 | 11262 | AAACAGGCTGTCAGGG | 129 | 479 |
| 1062264 | 1185 | 1200 | 12055 | 12070 | GTCGCATGTTGTGGAA | 5* | 480 |
| 1062296 | 1430 | 1445 | 13840 | 13855 | CTGGCTCCGTTTCTTG | 91 | 481 |
| 1062328 | 1595 | 1610 | 14005 | 14020 | GACAGTGGAAACCTCA | 71 | 482 |
| 1062360 | 1854 | 1869 | 14264 | 14279 | GTGAGGGACAGGATTG | 76 | 483 |
| 1062392 | 2040 | 2055 | 14450 | 14465 | GTGTAGGCCTCTGGGC | 201 | 484 |
| 1062424 | 2212 | 2227 | 14622 | 14637 | TTTTTGGCAAGGCAGT | 154 | 485 |
| 1062456 | N/A | N/A | 8301 | 8316 | TCCACTGACCTGTCCT | 74 | 486 |
| 1062488 | N/A | N/A | 13603 | 13618 | AGCTGCGATGGCACTT | 123 | 487 |
| 1062520 | N/A | N/A | 553 | 568 | ACCTTGGTGAAGTGGA | 60 | 488 |
| 1062552 | N/A | N/A | 687 | 702 | CCTTACCTGGCTGGAA | 130 | 489 |
| 1062584 | N/A | N/A | 879 | 894 | CAGTTGCACCTGGACA | 81 | 490 |
| 1062616 | N/A | N/A | 1111 | 1126 | GGAGATCGATGGAGTG | 93 | 491 |
| 1062648 | N/A | N/A | 1259 | 1274 | GAACTGATGCTCACTC | 78 | 492 |
| 1062681 | N/A | N/A | 1340 | 1355 | TCTAAAGCGATACAAG | 104 | 493 |
| 1062713 | N/A | N/A | 1490 | 1505 | AATCGAGCTCACCCCA | 208 | 494 |
| 1062745 | N/A | N/A | 1726 | 1741 | ACAATCGGCACTTGGT | 84 | 495 |
| 1062777 | N/A | N/A | 1886 | 1901 | GAGCATAAAATAGGAC | 93 | 496 |
| 1062809 | N/A | N/A | 2077 | 2092 | ACCCTATTAGGAGTAA | 133 | 497 |
| 1062841 | N/A | N/A | 2234 | 2249 | CATCATAAGCATCACA | 101 | 498 |
| 1062873 | N/A | N/A | 2396 | 2411 | CTTAACCTCTATAGTA | 106 | 499 |
| 1062905 | N/A | N/A | 2616 | 2631 | GATCTTGGGTTTATTG | 207 | 500 |
| 1062937 | N/A | N/A | 2735 | 2750 | AGTGAATAGTCAGTCC | 76 | 501 |
| 1062969 | N/A | N/A | 2905 | 2920 | CCTGGTATAAGAACAG | 86 | 502 |
| 1063001 | N/A | N/A | 3100 | 3115 | GGACACATGCATGGAG | 95 | 503 |
| 1063033 | N/A | N/A | 3248 | 3263 | AGTCATTAGGTGTCTG | 49 | 504 |
| 1063065 | N/A | N/A | 3392 | 3407 | CCTGAGATCTAGGCTT | 77 | 505 |
| 1063097 | N/A | N/A | 3658 | 3673 | ACTGACATGCCTCCAT | 32 | 506 |
| 1063129 | N/A | N/A | 3884 | 3899 | GTCCACTCTGGAACAA | 123 | 507 |
| 1063161 | N/A | N/A | 4123 | 4138 | GTATAACACCAGGACC | 135 | 508 |
| 1063193 | N/A | N/A | 4236 | 4251 | CCCCTAGCTCTGAAGA | 106 | 509 |
| 1063225 | N/A | N/A | 4414 | 4429 | CGGCCGGATGCGCCGG | 158 | 510 |
| 1063256 | N/A | N/A | 4584 | 4599 | GCCGGCTTCCTGCACT | 145 | 511 |
| 1063288 | N/A | N/A | 4714 | 4729 | GGCCAGAGCTAAGAAT | 52 | 512 |
| 1063320 | N/A | N/A | 5094 | 5109 | CTCCGAACAAGGGCCT | 41 | 513 |
| 1063352 | N/A | N/A | 5313 | 5328 | CTGAGTTGGGCACACA | 93 | 514 |
| 1063384 | N/A | N/A | 5521 | 5536 | TCCTGGTCTGAGAGGA | 170 | 515 |
| 1063416 | N/A | N/A | 5686 | 5701 | GCCTCAAATGCCCACT | 91 | 516 |
| 1063448 | N/A | N/A | 5858 | 5873 | GCAAGGAGGCGAGTCC | 57 | 517 |
| 1063480 | N/A | N/A | 6015 | 6030 | TGGAAGGACCGAGCTG | 101 | 518 |
| 1063512 | N/A | N/A | 6139 | 6154 | GAGAAGGCGAGAAGTG | 109 | 519 |
| 1063544 | N/A | N/A | 6293 | 6308 | GTCTCGGACTTTCTCC | 217 | 520 |
| 1063576 | N/A | N/A | 6483 | 6498 | CCACACATGCCCCACG | 95 | 521 |
| 1063608 | N/A | N/A | 6983 | 6998 | GTCGGCACCTGTAGGT | 122 | 522 |
| 1063640 | N/A | N/A | 7175 | 7190 | GACTACAATACGGCCT | 83 | 523 |
| 1063672 | N/A | N/A | 7382 | 7397 | CTCTGCACTGCAAGCC | 91 | 524 |
| 1063704 | N/A | N/A | 7867 | 7882 | AGCCTACACTGCTCAC | 69 | 525 |
| 1063736 | N/A | N/A | 8001 | 8016 | TGTAAAGCTCTGTGGT | 61 | 526 |
| 1063768 | N/A | N/A | 8048 | 8063 | GAAGCTTAAAGACGGC | 34 | 527 |
| 1063799 | N/A | N/A | 8563 | 8578 | TACTACTTATTGGGAT | 158 | 528 |
| 1063831 | N/A | N/A | 8852 | 8867 | AGGAGTAGCAGGGCAA | 76 | 529 |
| 1063863 | N/A | N/A | 9054 | 9069 | TGCTAAGGGTTGTGTG | 108 | 530 |
| 1063895 | N/A | N/A | 9425 | 9440 | TCCGCCTGGCAGTGCC | 25 | 531 |
| 1063927 | N/A | N/A | 9687 | 9702 | ACATGAGGCCTCAGCC | 111 | 532 |
| 1063959 | N/A | N/A | 9963 | 9978 | GTCAGAGGGTTTGTAA | 63 | 533 |
| 1063991 | N/A | N/A | 10543 | 10558 | ATTCGCATCATGAGAA | 188 | 534 |
| 1064023 | N/A | N/A | 11115 | 11130 | AGGCTTAAACTTCCCA | 119 | 535 |
| 1064055 | N/A | N/A | 11383 | 11398 | CAGCATGGAGCTCCTT | 98 | 536 |
| 1064087 | N/A | N/A | 11554 | 11569 | GGTGAGGCATGGCCCC | 86 | 537 |
| 1064121 | N/A | N/A | 11653 | 11668 | GATTTTCCTTGGTCAG | 51 | 538 |
| 1064153 | N/A | N/A | 11728 | 11743 | CTCTGATCCCTGCTAA | 139 | 539 |
| 1064185 | N/A | N/A | 11810 | 11825 | CCGAGGTTGAAAAGAA | 150 | 540 |
| 1064217 | N/A | N/A | 11919 | 11934 | AGATCTCACCGTCAAC | 142 | 541 |
| 1064249 | N/A | N/A | 11984 | 11999 | CCCCATGCAGGACCTC | 96 | 542 |
| 1064281 | N/A | N/A | 12202 | 12217 | TTGGGAATGGAGGAAC | 151 | 543 |
| 1064313 | N/A | N/A | 12396 | 12411 | CTATTTTATGGGTCCA | 13 | 544 |
| 1064345 | N/A | N/A | 12584 | 12599 | TTAAGGATCAAATGGG | 65 | 545 |
| 1064377 | N/A | N/A | 12786 | 12801 | TACAGAGTCAGCGATG | 82 | 546 |
| 1064409 | N/A | N/A | 12927 | 12942 | TTTGAATTATCGAGTA | 83 | 547 |
| 1064441 | N/A | N/A | 13221 | 13236 | AGGTAAGGGATCAGGA | 150 | 548 |

TABLE 12
Inhibition of Foxp3 mRNA by 3-10-3 cEt gapmers targeting SEQ ID NO.: 1, and 2

| Compound | SEQ ID NO: 1 | SEQ ID NO: 1 | SEQ ID NO: 2 | SEQ ID NO: 2 | Sequence | FOXP3 | SEQ |
|---|---|---|---|---|---|---|---|
| Number | Start Site | Stop Site | Start Site | Stop Site | (5′ to 3′) | (% UTC) | ID NO |
| 910956 | 1800 | 1815 | 14210 | 14225 | AGTAATCTGTGCGAGC | 17 | 250 |
| 911144 | N/A | N/A | 7355 | 7370 | TGCTATGATCATCCCC | 53 | 65 |
| 1062009 | 5 | 20 | 405 | 420 | TTTTTTCGATGAGTGT | 35 | 549 |
| 1062041 | 143 | 158 | 543 | 558 | AGTGGACTGACAGAAA | 117 | 550 |
| 1062073 | 314 | 329 | 6852 | 6867 | GCCCTGGAAGGTTCCC | 94 | 551 |
| 1062105 | 461 | 476 | 7526 | 7541 | GAGGAGTGCCTGTAAG | 103 | 552 |
| 1062137 | 600 | 615 | 7763 | 7778 | GGGAGAAGACCCCAGT | 107 | 553 |
| 1062169 | 771 | 786 | 8417 | 8432 | TGCAGACACCATTTGC | 159 | 554 |
| 1062201 | 895 | 910 | 9485 | 9500 | GACTGTACCATCTCTC | 126 | 555 |
| 1062233 | 1098 | 1113 | 11254 | 11269 | GGACAGCAAACAGGCT | 122 | 556 |
| 1062265 | 1186 | 1201 | 12056 | 12071 | GGTCGCATGTTGTGGA | 1* | 557 |
| 1062297 | 1433 | 1448 | 13843 | 13858 | CCTCTGGCTCCGTTTC | 110 | 558 |
| 1062329 | 1596 | 1611 | 14006 | 14021 | AGACAGTGGAAACCTC | 117 | 559 |
| 1062361 | 1856 | 1871 | 14266 | 14281 | GAGTGAGGGACAGGAT | 95 | 560 |
| 1062393 | 2041 | 2056 | 14451 | 14466 | TGTGTAGGCCTCTGGG | 32 | 561 |
| 1062425 | 2215 | 2230 | 14625 | 14640 | GTATTTTTGGCAAGGC | 14 | 562 |
| 1062457 | N/A | N/A | 8304 | 8319 | CTGTCCACTGACCTGT | 160 | 563 |
| 1062489 | N/A | N/A | 13609 | 13624 | ACTTTGAGCTGCGATG | 63 | 564 |
| 1062521 | N/A | N/A | 554 | 569 | CACCTTGGTGAAGTGG | 144 | 565 |
| 1062553 | N/A | N/A | 688 | 703 | ACCTTACCTGGCTGGA | 141 | 566 |
| 1062585 | N/A | N/A | 880 | 895 | TCAGTTGCACCTGGAC | 118 | 567 |
| 1062617 | N/A | N/A | 1112 | 1127 | AGGAGATCGATGGAGT | 100 | 568 |
| 1062649 | N/A | N/A | 1260 | 1275 | AGAACTGATGCTCACT | 82 | 569 |
| 1062682 | N/A | N/A | 1341 | 1356 | CTCTAAAGCGATACAA | 125 | 570 |
| 1062714 | N/A | N/A | 1491 | 1506 | GAATCGAGCTCACCCC | 112 | 571 |
| 1062746 | N/A | N/A | 1727 | 1742 | AACAATCGGCACTTGG | 56 | 572 |
| 1062778 | N/A | N/A | 1887 | 1902 | GGAGCATAAAATAGGA | 97 | 573 |
| 1062810 | N/A | N/A | 2078 | 2093 | CACCCTATTAGGAGTA | 95 | 574 |
| 1062842 | N/A | N/A | 2235 | 2250 | CCATCATAAGCATCAC | 76 | 575 |
| 1062874 | N/A | N/A | 2397 | 2412 | TCTTAACCTCTATAGT | 105 | 576 |
| 1062906 | N/A | N/A | 2618 | 2633 | CTGATCTTGGGTTTAT | 63 | 577 |
| 1062938 | N/A | N/A | 2736 | 2751 | GAGTGAATAGTCAGTC | 21 | 578 |
| 1062970 | N/A | N/A | 2920 | 2935 | GCAAAACAGTGTGGCC | 112 | 579 |
| 1063002 | N/A | N/A | 3125 | 3140 | GATAGTGAGAGACATT | 73 | 580 |
| 1063034 | N/A | N/A | 3249 | 3264 | AAGTCATTAGGTGTCT | 77 | 581 |
| 1063066 | N/A | N/A | 3393 | 3408 | TCCTGAGATCTAGGCT | 101 | 582 |
| 1063098 | N/A | N/A | 3666 | 3681 | CCTGACTGACTGACAT | 148 | 583 |
| 1063130 | N/A | N/A | 3886 | 3901 | CTGTCCACTCTGGAAC | 121 | 584 |
| 1063162 | N/A | N/A | 4124 | 4139 | AGTATAACACCAGGAC | 54 | 585 |
| 1063194 | N/A | N/A | 4243 | 4258 | TGACAAGCCCCTAGCT | 121 | 586 |
| 1063226 | N/A | N/A | 4418 | 4433 | ATGGCGGCCGGATGCG | 103 | 587 |
| 1063257 | N/A | N/A | 4586 | 4601 | CAGCCGGCTTCCTGCA | 124 | 588 |
| 1063289 | N/A | N/A | 4719 | 4734 | CACTTGGCCAGAGCTA | 88 | 589 |
| 1063321 | N/A | N/A | 5095 | 5110 | GCTCCGAACAAGGGCC | 177 | 590 |
| 1063353 | N/A | N/A | 5314 | 5329 | ACTGAGTTGGGCACAC | 62 | 591 |
| 1063385 | N/A | N/A | 5522 | 5537 | ATCCTGGTCTGAGAGG | 138 | 592 |
| 1063417 | N/A | N/A | 5727 | 5742 | CCAATTTCTGGCCCTC | 115 | 593 |
| 1063449 | N/A | N/A | 5859 | 5874 | GGCAAGGAGGCGAGTC | 65 | 594 |
| 1063481 | N/A | N/A | 6016 | 6031 | CTGGAAGGACCGAGCT | 75 | 595 |
| 1063513 | N/A | N/A | 6140 | 6155 | GGAGAAGGCGAGAAGT | 95 | 596 |
| 1063545 | N/A | N/A | 6303 | 6318 | GCCGGAGCTGGTCTCG | 108 | 597 |
| 1063577 | N/A | N/A | 6563 | 6578 | CCATAGTTGCACCCCA | 135 | 598 |
| 1063609 | N/A | N/A | 6985 | 7000 | AGGTCGGCACCTGTAG | 126 | 599 |
| 1063641 | N/A | N/A | 7176 | 7191 | GGACTACAATACGGCC | 118 | 600 |
| 1063673 | N/A | N/A | 7387 | 7402 | AAATACTCTGCACTGC | 105 | 601 |
| 1063705 | N/A | N/A | 7868 | 7883 | TAGCCTACACTGCTCA | 118 | 602 |
| 1063737 | N/A | N/A | 8006 | 8021 | AGCTTTGTAAAGCTCT | 117 | 603 |
| 1063769 | N/A | N/A | 8049 | 8064 | AGAAGCTTAAAGACGG | 11 | 604 |
| 1063800 | N/A | N/A | 8564 | 8579 | TTACTACTTATTGGGA | 103 | 605 |
| 1063832 | N/A | N/A | 8854 | 8869 | TGAGGAGTAGCAGGGC | 72 | 606 |
| 1063864 | N/A | N/A | 9055 | 9070 | CTGCTAAGGGTTGTGT | 104 | 607 |
| 1063896 | N/A | N/A | 9503 | 9518 | ATTACCTGCTGCTCCA | 142 | 608 |
| 1063928 | N/A | N/A | 9688 | 9703 | AACATGAGGCCTCAGC | 80 | 609 |
| 1063960 | N/A | N/A | 10283 | 10298 | TCTTAGAGTCAGAGGG | 45 | 610 |
| 1063992 | N/A | N/A | 10545 | 10560 | ACATTCGCATCATGAG | 57 | 611 |
| 1064024 | N/A | N/A | 11116 | 11131 | GAGGCTTAAACTTCCC | 104 | 612 |
| 1064056 | N/A | N/A | 11386 | 11401 | GGGCAGCATGGAGCTC | 157 | 613 |
| 1064088 | N/A | N/A | 11560 | 11575 | AGAGTGGGTGAGGCAT | 133 | 614 |
| 1064122 | N/A | N/A | 11654 | 11669 | CGATTTTCCTTGGTCA | 42 | 615 |
| 1064154 | N/A | N/A | 11729 | 11744 | TCTCTGATCCCTGCTA | 71 | 616 |
| 1064186 | N/A | N/A | 11811 | 11826 | CCCGAGGTTGAAAAGA | 118 | 617 |
| 1064218 | N/A | N/A | 11920 | 11935 | GAGATCTCACCGTCAA | 71 | 618 |
| 1064250 | N/A | N/A | 11987 | 12002 | AAGCCCCATGCAGGAC | 154 | 619 |
| 1064282 | N/A | N/A | 12240 | 12255 | CATTTGAGGCACGGCT | 140 | 620 |
| 1064314 | N/A | N/A | 12399 | 12414 | AGGCTATTTTATGGGT | 102 | 621 |
| 1064346 | N/A | N/A | 12585 | 12600 | GTTAAGGATCAAATGG | 117 | 622 |
| 1064378 | N/A | N/A | 12787 | 12802 | TTACAGAGTCAGCGAT | 125 | 623 |
| 1064410 | N/A | N/A | 12936 | 12951 | CAGAGATGGTTTGAAT | 67 | 624 |
| 1064442 | N/A | N/A | 13222 | 13237 | TAGGTAAGGGATCAGG | 79 | 625 |

TABLE 13
Inhibition of Foxp3 mRNA by 3-10-3 cEt gapmers targeting SEQ ID NO.: 1, and 2

| Compound | SEQ ID NO: 1 | SEQ ID NO: 1 | SEQ ID NO: 2 | SEQ ID NO: 2 | Sequence | FOXP3 | SEQ |
|---|---|---|---|---|---|---|---|
| Number | Start Site | Stop Site | Start Site | Stop Site | (5′ to 3′) | (% UTC) | ID NO |
| 910956 | 1800 | 1815 | 14210 | 14225 | AGTAATCTGTGCGAGC | 40 | 250 |
| 911144 | N/A | N/A | 7355 | 7370 | TGCTATGATCATCCCC | 28 | 65 |
| 1062010 | 6 | 21 | 406 | 421 | TTTTTTTCGATGAGTG | 22 | 627 |
| 1062042 | 145 | 160 | 545 | 560 | GAAGTGGACTGACAGA | 58 | 628 |
| 1062074 | 316 | 331 | 6854 | 6869 | CGGCCCTGGAAGGTTC | 149 | 629 |
| 1062106 | 462 | 477 | 7527 | 7542 | GGAGGAGTGCCTGTAA | 89 | 630 |
| 1062138 | 614 | 629 | 7777 | 7792 | AGGCCGGGCCTTGAGG | 138 | 631 |
| 1062170 | 793 | 808 | 8439 | 8454 | ACCTTCTCACATCCGG | 61 | 632 |
| 1062202 | 896 | 911 | 9486 | 9501 | AGACTGTACCATCTCT | 135 | 633 |
| 1062234 | 1100 | 1115 | 11256 | 11271 | CCGGACAGCAAACAGG | 105 | 634 |
| 1062266 | 1248 | 1263 | 13478 | 13493 | TCCGCTGCTTCTCTGG | 7* | 635 |
| 1062298 | 1449 | 1464 | 13859 | 13874 | TGGAACACCTGCTGGG | 231 | 636 |
| 1062330 | 1599 | 1614 | 14009 | 14024 | GCAAGACAGTGGAAAC | 88 | 637 |
| 1062362 | 1887 | 1902 | 14297 | 14312 | GGCAGGCTCTCTGTGT | 84 | 638 |
| 1062394 | 2042 | 2057 | 14452 | 14467 | CTGTGTAGGCCTCTGG | 50 | 639 |
| 1062426 | 2245 | 2260 | 14655 | 14670 | GAGTGAGGTGAGTGGC | 43 | 640 |
| 1062458 | N/A | N/A | 8321 | 8336 | GAGGATCCTTCCCAGC | 156 | 641 |
| 1062490 | N/A | N/A | 13610 | 13625 | CACTTTGAGCTGCGAT | 185 | 642 |
| 1062522 | N/A | N/A | 555 | 570 | TCACCTTGGTGAAGTG | 137 | 643 |
| 1062554 | N/A | N/A | 689 | 704 | GACCTTACCTGGCTGG | 105 | 644 |
| 1062586 | N/A | N/A | 884 | 899 | ATTTTCAGTTGCACCT | 123 | 645 |
| 1062618 | N/A | N/A | 1113 | 1128 | AAGGAGATCGATGGAG | 140 | 646 |
| 1062650 | N/A | N/A | 1261 | 1276 | CAGAACTGATGCTCAC | 53 | 647 |
| 1062683 | N/A | N/A | 1342 | 1357 | CCTCTAAAGCGATACA | 70 | 648 |
| 1062715 | N/A | N/A | 1492 | 1507 | AGAATCGAGCTCACCC | 67 | 649 |
| 1062747 | N/A | N/A | 1728 | 1743 | CAACAATCGGCACTTG | 117 | 650 |
| 1062779 | N/A | N/A | 1889 | 1904 | AGGGAGCATAAAATAG | 135 | 651 |
| 1062811 | N/A | N/A | 2079 | 2094 | ACACCCTATTAGGAGT | 101 | 652 |
| 1062843 | N/A | N/A | 2237 | 2252 | AACCATCATAAGCATC | 78 | 653 |
| 1062875 | N/A | N/A | 2398 | 2413 | CTCTTAACCTCTATAG | 133 | 654 |
| 1062907 | N/A | N/A | 2619 | 2634 | GCTGATCTTGGGTTTA | 38 | 655 |
| 1062939 | N/A | N/A | 2737 | 2752 | TGAGTGAATAGTCAGT | 59 | 656 |
| 1062971 | N/A | N/A | 2940 | 2955 | GTATTGCAAAGCAACA | 217 | 657 |
| 1063003 | N/A | N/A | 3133 | 3148 | GAACAAGAGATAGTGA | 118 | 658 |
| 1063035 | N/A | N/A | 3251 | 3266 | TTAAGTCATTAGGTGT | 56 | 659 |
| 1063067 | N/A | N/A | 3395 | 3410 | AGTCCTGAGATCTAGG | 55 | 660 |
| 1063099 | N/A | N/A | 3668 | 3683 | AGCCTGACTGACTGAC | 52 | 661 |
| 1063131 | N/A | N/A | 3905 | 3920 | CCCTAGGGCCTCAGTC | 144 | 662 |
| 1063163 | N/A | N/A | 4125 | 4140 | TAGTATAACACCAGGA | 44 | 663 |
| 1063195 | N/A | N/A | 4245 | 4260 | TATGACAAGCCCCTAG | 156 | 664 |
| 1063227 | N/A | N/A | 4421 | 4436 | GTCATGGCGGCCGGAT | 121 | 665 |
| 1063258 | N/A | N/A | 4589 | 4604 | GGGCAGCCGGCTTCCT | 209 | 666 |
| 1063290 | N/A | N/A | 4720 | 4735 | ACACTTGGCCAGAGCT | 102 | 667 |
| 1063322 | N/A | N/A | 5117 | 5132 | ACAGGAGTGTGGGTCT | 164 | 668 |
| 1063354 | N/A | N/A | 5318 | 5333 | CAGCACTGAGTTGGGC | 106 | 669 |
| 1063386 | N/A | N/A | 5524 | 5539 | TAATCCTGGTCTGAGA | 113 | 670 |
| 1063418 | N/A | N/A | 5728 | 5743 | CCCAATTTCTGGCCCT | 95 | 671 |
| 1063450 | N/A | N/A | 5860 | 5875 | GGGCAAGGAGGCGAGT | 76 | 672 |
| 1063482 | N/A | N/A | 6017 | 6032 | GCTGGAAGGACCGAGC | 199 | 673 |
| 1063514 | N/A | N/A | 6158 | 6173 | GAATGGGCTGGTGGCA | 103 | 674 |
| 1063546 | N/A | N/A | 6363 | 6378 | TTTCAAGCCTCAGGCC | 169 | 675 |
| 1063578 | N/A | N/A | 6565 | 6580 | CCCCATAGTTGCACCC | 48 | 676 |
| 1063610 | N/A | N/A | 6986 | 7001 | AAGGTCGGCACCTGTA | 162 | 677 |
| 1063642 | N/A | N/A | 7195 | 7210 | ACACATAGCTATGCTC | 125 | 678 |
| 1063674 | N/A | N/A | 7388 | 7403 | CAAATACTCTGCACTG | 104 | 679 |
| 1063706 | N/A | N/A | 7869 | 7884 | ATAGCCTACACTGCTC | 219 | 680 |
| 1063738 | N/A | N/A | 8009 | 8024 | ACTAGCTTTGTAAAGC | 150 | 681 |
| 1063770 | N/A | N/A | 8056 | 8071 | CTGGCAGAGAAGCTTA | 207 | 682 |
| 1063801 | N/A | N/A | 8566 | 8581 | TCTTACTACTTATTGG | 88 | 683 |
| 1063833 | N/A | N/A | 8856 | 8871 | CATGAGGAGTAGCAGG | 291 | 684 |
| 1063865 | N/A | N/A | 9056 | 9071 | GCTGCTAAGGGTTGTG | 176 | 685 |
| 1063897 | N/A | N/A | 9504 | 9519 | CATTACCTGCTGCTCC | 120 | 686 |
| 1063929 | N/A | N/A | 9689 | 9704 | AAACATGAGGCCTCAG | 214 | 687 |
| 1063961 | N/A | N/A | 10285 | 10300 | GATCTTAGAGTCAGAG | 111 | 688 |
| 1063993 | N/A | N/A | 10547 | 10562 | GTACATTCGCATCATG | 80 | 689 |
| 1064025 | N/A | N/A | 11117 | 11132 | AGAGGCTTAAACTTCC | 131 | 690 |
| 1064057 | N/A | N/A | 11445 | 11460 | CGGATGCATTTTCCCA | 250 | 691 |
| 1064089 | N/A | N/A | 11564 | 11579 | GTCCAGAGTGGGTGAG | 78 | 692 |
| 1064123 | N/A | N/A | 11655 | 11670 | CCGATTTTCCTTGGTC | 111 | 693 |
| 1064155 | N/A | N/A | 11735 | 11750 | TCAAGGTCTCTGATCC | 96 | 694 |
| 1064187 | N/A | N/A | 11813 | 11828 | TCCCCGAGGTTGAAAA | 173 | 695 |
| 1064219 | N/A | N/A | 11922 | 11937 | CTGAGATCTCACCGTC | 121 | 696 |
| 1064251 | N/A | N/A | 11990 | 12005 | ATCAAGCCCCATGCAG | 144 | 697 |
| 1064283 | N/A | N/A | 12241 | 12256 | ACATTTGAGGCACGGC | 86 | 698 |
| 1064315 | N/A | N/A | 12430 | 12445 | TAGGGCAAGGTGCAGA | 86 | 699 |
| 1064347 | N/A | N/A | 12586 | 12601 | AGTTAAGGATCAAATG | 172 | 700 |
| 1064379 | N/A | N/A | 12788 | 12803 | ATTACAGAGTCAGCGA | 105 | 701 |
| 1064411 | N/A | N/A | 12937 | 12952 | CCAGAGATGGTTTGAA | 186 | 702 |
| 1064443 | N/A | N/A | 13223 | 13238 | TTAGGTAAGGGATCAG | 113 | 703 |

TABLE 14
Inhibition of Foxp3 mRNA by 3-10-3 cEt gapmers targeting SEQ ID NO.: 1, and 2

| Compound | SEQ ID NO: 1 | SEQ ID NO: 1 | SEQ ID NO: 2 | SEQ ID NO: 2 | Sequence | FOXP3 | SEQ |
|---|---|---|---|---|---|---|---|
| Number | Start Site | Stop Site | Start Site | Stop Site | (5′ to 3′) | (% UTC) | ID NO |
| 895475 | N/A | N/A | 4422 | 4437 | CGTCATGGCGGCCGGA | 96 | 704 |
| 910956 | 1800 | 1815 | 14210 | 14225 | AGTAATCTGTGCGAGC | 27 | 250 |
| 911144 | N/A | N/A | 7355 | 7370 | TGCTATGATCATCCCC | 42 | 65 |
| 1062011 | 8 | 23 | 408 | 423 | AATTTTTTTCGATGAG | 80 | 705 |
| 1062043 | 146 | 161 | 546 | 561 | TGAAGTGGACTGACAG | 83 | 706 |
| 1062075 | 318 | 333 | 6856 | 6871 | CTCGGCCCTGGAAGGT | 106 | 707 |
| 1062107 | 463 | 478 | 7528 | 7543 | TGGAGGAGTGCCTGTA | 64 | 708 |
| 1062139 | 615 | 630 | 7778 | 7793 | CAGGCCGGGCCTTGAG | 95 | 709 |
| 1062171 | 796 | 811 | 8442 | 8457 | AAGACCTTCTCACATC | 80 | 710 |
| 1062203 | 897 | 912 | 9487 | 9502 | GAGACTGTACCATCTC | 145 | 711 |
| 1062235 | 1101 | 1116 | 11257 | 11272 | TCCGGACAGCAAACAG | 120 | 712 |
| 1062267 | 1251 | 1266 | 13481 | 13496 | GTGTCCGCTGCTTCTC | 3* | 713 |
| 1062299 | 1450 | 1465 | 13860 | 13875 | TTGGAACACCTGCTGG | 48 | 714 |
| 1062331 | 1738 | 1753 | 14148 | 14163 | TGCAGGGCTCGACTGG | 42 | 715 |
| 1062363 | 1894 | 1909 | 14304 | 14319 | GTACTGAGGCAGGCTC | 57 | 716 |
| 1062395 | 2043 | 2058 | 14453 | 14468 | TCTGTGTAGGCCTCTG | 11 | 717 |
| 1062427 | 2268 | 2283 | N/A | N/A | ATGGATCAGGGCTCAG | 28 | 718 |
| 1062459 | N/A | N/A | 8322 | 8337 | CGAGGATCCTTCCCAG | 144 | 719 |
| 1062491 | N/A | N/A | 13611 | 13626 | CCACTTTGAGCTGCGA | 98 | 720 |
| 1062523 | N/A | N/A | 556 | 571 | CTCACCTTGGTGAAGT | 131 | 721 |
| 1062555 | N/A | N/A | 690 | 705 | AGACCTTACCTGGCTG | 108 | 722 |
| 1062587 | N/A | N/A | 885 | 900 | AATTTTCAGTTGCACC | 96 | 723 |
| 1062619 | N/A | N/A | 1114 | 1129 | AAAGGAGATCGATGGA | 80 | 724 |
| 1062651 | N/A | N/A | 1263 | 1278 | AACAGAACTGATGCTC | 77 | 725 |
| 1062684 | N/A | N/A | 1343 | 1358 | TCCTCTAAAGCGATAC | 99 | 726 |
| 1062716 | N/A | N/A | 1493 | 1508 | CAGAATCGAGCTCACC | 58 | 727 |
| 1062748 | N/A | N/A | 1730 | 1745 | TCCAACAATCGGCACT | 78 | 728 |
| 1062780 | N/A | N/A | 1894 | 1909 | AGTAGAGGGAGCATAA | 100 | 729 |
| 1062812 | N/A | N/A | 2080 | 2095 | AACACCCTATTAGGAG | 77 | 730 |
| 1062844 | N/A | N/A | 2253 | 2268 | CTATTTGACTGTATAA | 134 | 731 |
| 1062876 | N/A | N/A | 2407 | 2422 | GTACCCACACTCTTAA | 100 | 732 |
| 1062908 | N/A | N/A | 2623 | 2638 | TAATGCTGATCTTGGG | 36 | 733 |
| 1062940 | N/A | N/A | 2739 | 2754 | ATTGAGTGAATAGTCA | 69 | 734 |
| 1062972 | N/A | N/A | 2943 | 2958 | ATTGTATTGCAAAGCA | 62 | 735 |
| 1063004 | N/A | N/A | 3144 | 3159 | CGAGCAAGAGAGAACA | 126 | 736 |
| 1063036 | N/A | N/A | 3252 | 3267 | GTTAAGTCATTAGGTG | 27 | 737 |
| 1063068 | N/A | N/A | 3396 | 3411 | GAGTCCTGAGATCTAG | 62 | 738 |
| 1063100 | N/A | N/A | 3710 | 3725 | AATCAAGGTTTTCGGG | 69 | 739 |
| 1063132 | N/A | N/A | 3906 | 3921 | TCCCTAGGGCCTCAGT | 81 | 740 |
| 1063164 | N/A | N/A | 4126 | 4141 | ATAGTATAACACCAGG | 31 | 741 |
| 1063196 | N/A | N/A | 4246 | 4261 | CTATGACAAGCCCCTA | 96 | 742 |
| 1063259 | N/A | N/A | 4591 | 4606 | CTGGGCAGCCGGCTTC | 104 | 743 |
| 1063291 | N/A | N/A | 4721 | 4736 | GACACTTGGCCAGAGC | 100 | 744 |
| 1063323 | N/A | N/A | 5118 | 5133 | AACAGGAGTGTGGGTC | 61 | 745 |
| 1063355 | N/A | N/A | 5321 | 5336 | TCACAGCACTGAGTTG | 82 | 746 |
| 1063387 | N/A | N/A | 5526 | 5541 | TATAATCCTGGTCTGA | 100 | 747 |
| 1063419 | N/A | N/A | 5729 | 5744 | CCCCAATTTCTGGCCC | 54 | 748 |
| 1063451 | N/A | N/A | 5862 | 5877 | CAGGGCAAGGAGGCGA | 77 | 749 |
| 1063483 | N/A | N/A | 6018 | 6033 | AGCTGGAAGGACCGAG | 79 | 750 |
| 1063515 | N/A | N/A | 6161 | 6176 | ACAGAATGGGCTGGTG | 118 | 751 |
| 1063547 | N/A | N/A | 6367 | 6382 | GCTGTTTCAAGCCTCA | 67 | 752 |
| 1063579 | N/A | N/A | 6582 | 6597 | GGACATGTCCCGAGGG | 51 | 753 |
| 1063611 | N/A | N/A | 6987 | 7002 | AAAGGTCGGCACCTGT | 190 | 754 |
| 1063643 | N/A | N/A | 7196 | 7211 | GACACATAGCTATGCT | 116 | 755 |
| 1063675 | N/A | N/A | 7390 | 7405 | TTCAAATACTCTGCAC | 107 | 756 |
| 1063707 | N/A | N/A | 7870 | 7885 | AATAGCCTACACTGCT | 205 | 757 |
| 1063739 | N/A | N/A | 8010 | 8025 | GACTAGCTTTGTAAAG | 94 | 758 |
| 1063771 | N/A | N/A | 8106 | 8121 | CGAAAACCCTGACTCC | 147 | 759 |
| 1063802 | N/A | N/A | 8567 | 8582 | ATCTTACTACTTATTG | 93 | 760 |
| 1063834 | N/A | N/A | 8857 | 8872 | GCATGAGGAGTAGCAG | 85 | 761 |
| 1063866 | N/A | N/A | 9098 | 9113 | GTGCAAAGGCCTGGCT | 167 | 762 |
| 1063898 | N/A | N/A | 9507 | 9522 | TGGCATTACCTGCTGC | 128 | 763 |
| 1063930 | N/A | N/A | 9690 | 9705 | CAAACATGAGGCCTCA | 127 | 764 |
| 1063962 | N/A | N/A | 10301 | 10316 | GATCACAGTGTTTGGG | 30 | 765 |
| 1063994 | N/A | N/A | 10578 | 10593 | TAAACCCCCCTGGCCT | 65 | 766 |
| 1064026 | N/A | N/A | 11119 | 11134 | CCAGAGGCTTAAACTT | 120 | 767 |
| 1064058 | N/A | N/A | 11448 | 11463 | GAGCGGATGCATTTTC | 69 | 768 |
| 1064090 | N/A | N/A | 11573 | 11588 | GTAGCTGGAGTCCAGA | 61 | 769 |
| 1064124 | N/A | N/A | 11656 | 11671 | CCCGATTTTCCTTGGT | 154 | 770 |
| 1064156 | N/A | N/A | 11736 | 11751 | GTCAAGGTCTCTGATC | 100 | 771 |
| 1064188 | N/A | N/A | 11821 | 11836 | AATAGTTCTCCCCGAG | 95 | 772 |
| 1064220 | N/A | N/A | 11923 | 11938 | CCTGAGATCTCACCGT | 153 | 773 |
| 1064252 | N/A | N/A | 11991 | 12006 | AATCAAGCCCCATGCA | 133 | 774 |
| 1064284 | N/A | N/A | 12278 | 12293 | TGCGGACAGGTTTGGG | 30 | 775 |
| 1064316 | N/A | N/A | 12432 | 12447 | TTTAGGGCAAGGTGCA | 85 | 776 |
| 1064348 | N/A | N/A | 12587 | 12602 | AAGTTAAGGATCAAAT | 122 | 777 |
| 1064380 | N/A | N/A | 12789 | 12804 | GATTACAGAGTCAGCG | 102 | 778 |
| 1064412 | N/A | N/A | 12950 | 12965 | TTTAGGTCAGAAGCCA | 171 | 779 |
| 1064444 | N/A | N/A | 13224 | 13239 | ATTAGGTAAGGGATCA | 122 | 780 |

TABLE 15
Inhibition of Foxp3 mRNA by 3-10-3 cEt gapmers targeting SEQ ID NO.: 1, and 2

| Compound | SEQ ID NO: 1 | SEQ ID NO: 1 | SEQ ID NO: 2 | SEQ ID NO: 2 | Sequence | FOXP3 | SEQ |
|---|---|---|---|---|---|---|---|
| Number | Start Site | Stop Site | Start Site | Stop Site | (5′ to 3′) | (% UTC) | ID NO |
| 911144 | N/A | N/A | 7355 | 7370 | TGCTATGATCATCCCC | 9 | 65 |
| 1062012 | 10 | 25 | 410 | 425 | CAAATTTTTTTCGATG | 65 | 781 |
| 1062044 | 149 | 164 | 549 | 564 | TGGTGAAGTGGACTGA | 25 | 782 |
| 1062076 | 319 | 334 | 6857 | 6872 | TCTCGGCCCTGGAAGG | 89 | 783 |
| 1062108 | 464 | 479 | 7529 | 7544 | CTGGAGGAGTGCCTGT | 74 | 784 |
| 1062140 | 633 | 648 | N/A | N/A | TGATCCCAGGTGGGAG | 92 | 785 |
| 1062172 | 798 | 813 | 8444 | 8459 | CGAAGACCTTCTCACA | 106 | 786 |
| 1062204 | 901 | 916 | 9491 | 9506 | TCCAGAGACTGTACCA | 76 | 787 |
| 1062236 | 1102 | 1117 | 11258 | 11273 | CTCCGGACAGCAAACA | 92 | 788 |
| 1062268 | 1253 | 1268 | 13483 | 13498 | GAGTGTCCGCTGCTTC | 5* | 789 |
| 1062300 | 1453 | 1468 | 13863 | 13878 | GGGTTGGAACACCTGC | 85 | 790 |
| 1062332 | 1740 | 1755 | 14150 | 14165 | GCTGCAGGGCTCGACT | 60 | 791 |
| 1062364 | 1895 | 1910 | 14305 | 14320 | TGTACTGAGGCAGGCT | 42 | 792 |
| 1062396 | 2050 | 2065 | 14460 | 14475 | CGCTGCTTCTGTGTAG | 31 | 793 |
| 1062428 | 2269 | 2284 | N/A | N/A | CATGGATCAGGGCTCA | 28 | 794 |
| 1062460 | N/A | N/A | 8323 | 8338 | GCGAGGATCCTTCCCA | 73 | 795 |
| 1062492 | N/A | N/A | 13612 | 13627 | CCCACTTTGAGCTGCG | 55 | 796 |
| 1062524 | N/A | N/A | 557 | 572 | ACTCACCTTGGTGAAG | 112 | 797 |
| 1062556 | N/A | N/A | 691 | 706 | AAGACCTTACCTGGCT | 72 | 798 |
| 1062588 | N/A | N/A | 928 | 943 | CATCAAGAGCTAAGAG | 96 | 799 |
| 1062620 | N/A | N/A | 1115 | 1130 | GAAAGGAGATCGATGG | 72 | 800 |
| 1062652 | N/A | N/A | 1265 | 1280 | TGAACAGAACTGATGC | 36 | 801 |
| 1062685 | N/A | N/A | 1350 | 1365 | AAGGGTCTCCTCTAAA | 62 | 802 |
| 1062717 | N/A | N/A | 1494 | 1509 | GCAGAATCGAGCTCAC | 53 | 803 |
| 1062749 | N/A | N/A | 1731 | 1746 | GTCCAACAATCGGCAC | 57 | 804 |
| 1062781 | N/A | N/A | 1895 | 1910 | AAGTAGAGGGAGCATA | 41 | 805 |
| 1062813 | N/A | N/A | 2081 | 2096 | GAACACCCTATTAGGA | 63 | 806 |
| 1062845 | N/A | N/A | 2255 | 2270 | ACCTATTTGACTGTAT | 56 | 807 |
| 1062877 | N/A | N/A | 2408 | 2423 | AGTACCCACACTCTTA | 52 | 808 |
| 1062909 | N/A | N/A | 2624 | 2639 | CTAATGCTGATCTTGG | 22 | 809 |
| 1062941 | N/A | N/A | 2741 | 2756 | TTATTGAGTGAATAGT | 54 | 810 |
| 1062973 | N/A | N/A | 2945 | 2960 | GAATTGTATTGCAAAG | 45 | 811 |
| 1063005 | N/A | N/A | 3145 | 3160 | GCGAGCAAGAGAGAAC | 58 | 812 |
| 1063037 | N/A | N/A | 3253 | 3268 | GGTTAAGTCATTAGGT | 19 | 813 |
| 1063069 | N/A | N/A | 3398 | 3413 | TAGAGTCCTGAGATCT | 95 | 814 |
| 1063101 | N/A | N/A | 3713 | 3728 | CACAATCAAGGTTTTC | 21 | 815 |
| 1063133 | N/A | N/A | 3946 | 3961 | TAGGGCCTCTTGCCTA | 110 | 816 |
| 1063165 | N/A | N/A | 4127 | 4142 | AATAGTATAACACCAG | 35 | 817 |
| 1063197 | N/A | N/A | 4249 | 4264 | CCACTATGACAAGCCC | 29 | 818 |
| 1063228 | N/A | N/A | 4438 | 4453 | ATTTTTCCGCCATTGA | 76 | 819 |
| 1063260 | N/A | N/A | 4608 | 4623 | GGACCTAGAGGGCCGG | 69 | 820 |
| 1063292 | N/A | N/A | 4722 | 4737 | GGACACTTGGCCAGAG | 53 | 821 |
| 1063324 | N/A | N/A | 5125 | 5140 | CGTGAGAAACAGGAGT | 20 | 822 |
| 1063356 | N/A | N/A | 5331 | 5346 | CCGTTCCACCTCACAG | 38 | 823 |
| 1063388 | N/A | N/A | 5527 | 5542 | CTATAATCCTGGTCTG | 64 | 824 |
| 1063420 | N/A | N/A | 5739 | 5754 | TCAGAGTTCACCCCAA | 48 | 825 |
| 1063452 | N/A | N/A | 5863 | 5878 | TCAGGGCAAGGAGGCG | 61 | 826 |
| 1063484 | N/A | N/A | 6019 | 6034 | CAGCTGGAAGGACCGA | 87 | 827 |
| 1063516 | N/A | N/A | 6162 | 6177 | CACAGAATGGGCTGGT | 46 | 828 |
| 1063548 | N/A | N/A | 6374 | 6389 | CTTGAGAGCTGTTTCA | 59 | 829 |
| 1063580 | N/A | N/A | 6584 | 6599 | TGGGACATGTCCCGAG | 59 | 830 |
| 1063612 | N/A | N/A | 6988 | 7003 | TAAAGGTCGGCACCTG | 84 | 831 |
| 1063644 | N/A | N/A | 7197 | 7212 | GGACACATAGCTATGC | 43 | 832 |
| 1063676 | N/A | N/A | 7424 | 7439 | GAGGCCATCCTGATCC | 52 | 833 |
| 1063708 | N/A | N/A | 7871 | 7886 | GAATAGCCTACACTGC | 75 | 834 |
| 1063740 | N/A | N/A | 8012 | 8027 | TTGACTAGCTTTGTAA | 34 | 835 |
| 1063772 | N/A | N/A | 8107 | 8122 | TCGAAAACCCTGACTC | 75 | 836 |
| 1063803 | N/A | N/A | 8580 | 8595 | GTTTAGCTCTTGCATC | 41 | 837 |
| 1063835 | N/A | N/A | 8860 | 8875 | TTGGCATGAGGAGTAG | 61 | 838 |
| 1063867 | N/A | N/A | 9107 | 9122 | GGACGGCCTGTGCAAA | 81 | 839 |
| 1063899 | N/A | N/A | 9508 | 9523 | CTGGCATTACCTGCTG | 91 | 840 |
| 1063931 | N/A | N/A | 9691 | 9706 | ACAAACATGAGGCCTC | 74 | 841 |
| 1063963 | N/A | N/A | 10305 | 10320 | TCAGGATCACAGTGTT | 19 | 842 |
| 1063995 | N/A | N/A | 10579 | 10594 | CTAAACCCCCCTGGCC | 71 | 843 |
| 1064027 | N/A | N/A | 11120 | 11135 | CCCAGAGGCTTAAACT | 87 | 844 |
| 1064059 | N/A | N/A | 11449 | 11464 | TGAGCGGATGCATTTT | 59 | 845 |
| 1064091 | N/A | N/A | 11575 | 11590 | TAGTAGCTGGAGTCCA | 16 | 846 |
| 1064125 | N/A | N/A | 11657 | 11672 | CCCCGATTTTCCTTGG | 32 | 847 |
| 1064157 | N/A | N/A | 11737 | 11752 | AGTCAAGGTCTCTGAT | 75 | 848 |
| 1064189 | N/A | N/A | 11822 | 11837 | AAATAGTTCTCCCCGA | 42 | 849 |
| 1064221 | N/A | N/A | 11924 | 11939 | GCCTGAGATCTCACCG | 42 | 850 |
| 1064253 | N/A | N/A | 11992 | 12007 | GAATCAAGCCCCATGC | 75 | 851 |
| 1064285 | N/A | N/A | 12282 | 12297 | GATTTGCGGACAGGTT | 67 | 852 |
| 1064317 | N/A | N/A | 12433 | 12448 | GTTTAGGGCAAGGTGC | 77 | 853 |
| 1064349 | N/A | N/A | 12589 | 12604 | TGAAGTTAAGGATCAA | 69 | 854 |
| 1064381 | N/A | N/A | 12793 | 12808 | ATGGGATTACAGAGTC | 40 | 855 |
| 1064413 | N/A | N/A | 12951 | 12966 | CTTTAGGTCAGAAGCC | 72 | 856 |
| 1064445 | N/A | N/A | 13225 | 13240 | GATTAGGTAAGGGATC | 104 | 857 |

TABLE 16
Inhibition of Foxp3 mRNA by 3-10-3 cEt gapmers targeting SEQ ID NO.: 1, and 2

| Compound | SEQ ID NO: 1 | SEQ ID NO: 1 | SEQ ID NO: 2 | SEQ ID NO: 2 | Sequence | FOXP3 | SEQ |
|---|---|---|---|---|---|---|---|
| Number | Start Site | Stop Site | Start Site | Stop Site | (5′ to 3′) | (% UTC) | ID NO |
| 911144 | N/A | N/A | 7355 | 7370 | TGCTATGATCATCCCC | 29 | 65 |
| 1062007 | 3 | 18 | 403 | 418 | TTTTCGATGAGTGTGT | 12 | 858 |
| 1062039 | 121 | 136 | 521 | 536 | AGCCTGGCTTGTGGGA | 68 | 859 |
| 1062071 | 312 | 327 | 6850 | 6865 | CCTGGAAGGTTCCCCC | 65 | 860 |
| 1062103 | 425 | 440 | 7490 | 7505 | TGCCCCGGAGGGTGCC | 87 | 861 |
| 1062135 | 596 | 611 | 7759 | 7774 | GAAGACCCCAGTGGCG | 47 | 862 |
| 1062167 | 762 | 777 | 8408 | 8423 | CATTTGCCAGCAGTGG | 76 | 863 |
| 1062199 | 877 | 892 | 9467 | 9482 | TGGAGGAGACATTGTG | 63 | 864 |
| 1062231 | 1060 | 1075 | 11216 | 11231 | GACCAGGCTGGGACGA | 42 | 865 |
| 1062263 | 1184 | 1199 | 12054 | 12069 | TCGCATGTTGTGGAAC | 2* | 866 |
| 1062295 | 1428 | 1443 | 13838 | 13853 | GGCTCCGTTTCTTGCG | 214 | 867 |
| 1062327 | 1594 | 1609 | 14004 | 14019 | ACAGTGGAAACCTCAC | 48 | 868 |
| 1062359 | 1853 | 1868 | 14263 | 14278 | TGAGGGACAGGATTGT | 75 | 869 |
| 1062391 | 2037 | 2052 | 14447 | 14462 | TAGGCCTCTGGGCACA | 67 | 870 |
| 1062423 | 2211 | 2226 | 14621 | 14636 | TTTTGGCAAGGCAGTG | 54 | 871 |
| 1062455 | N/A | N/A | 8300 | 8315 | CCACTGACCTGTCCTT | 114 | 872 |
| 1062487 | N/A | N/A | 13602 | 13617 | GCTGCGATGGCACTTG | 74 | 873 |
| 1062551 | N/A | N/A | 686 | 701 | CTTACCTGGCTGGAAT | 78 | 874 |
| 1062583 | N/A | N/A | 868 | 883 | GGACAGCATTTCAAGT | 60 | 875 |
| 1062615 | N/A | N/A | 1110 | 1125 | GAGATCGATGGAGTGT | 61 | 876 |
| 1062647 | N/A | N/A | 1251 | 1266 | GCTCACTCTCATAAAA | 67 | 877 |
| 1062680 | N/A | N/A | 1339 | 1354 | CTAAAGCGATACAAGC | 43 | 878 |
| 1062712 | N/A | N/A | 1489 | 1504 | ATCGAGCTCACCCCAG | 11 | 879 |
| 1062744 | N/A | N/A | 1725 | 1740 | CAATCGGCACTTGGTC | 46 | 880 |
| 1062776 | N/A | N/A | 1879 | 1894 | AAATAGGACAACCTTT | 74 | 881 |
| 1062808 | N/A | N/A | 2076 | 2091 | CCCTATTAGGAGTAAG | 58 | 882 |
| 1062840 | N/A | N/A | 2162 | 2177 | CTATATATGTAATGGC | 14 | 883 |
| 1062872 | N/A | N/A | 2395 | 2410 | TTAACCTCTATAGTAA | 58 | 884 |
| 1062904 | N/A | N/A | 2615 | 2630 | ATCTTGGGTTTATTGT | 21 | 885 |
| 1062936 | N/A | N/A | 2733 | 2748 | TGAATAGTCAGTCCAT | 34 | 886 |
| 1062968 | N/A | N/A | 2873 | 2888 | CAGAATAGAAAGCTTG | 60 | 887 |
| 1063000 | N/A | N/A | 3088 | 3103 | GGAGAGCCAGAGTGCA | 81 | 888 |
| 1063032 | N/A | N/A | 3247 | 3262 | GTCATTAGGTGTCTGC | 3 | 889 |
| 1063064 | N/A | N/A | 3391 | 3406 | CTGAGATCTAGGCTTG | 46 | 890 |
| 1063096 | N/A | N/A | 3645 | 3660 | CATCATCACCACGCTC | 60 | 891 |
| 1063128 | N/A | N/A | 3865 | 3880 | TCCCAAATACATGGCC | 70 | 892 |
| 1063160 | N/A | N/A | 4122 | 4137 | TATAACACCAGGACCT | 66 | 893 |
| 1063192 | N/A | N/A | 4235 | 4250 | CCCTAGCTCTGAAGAC | 71 | 894 |
| 1063224 | N/A | N/A | 4412 | 4427 | GCCGGATGCGCCGGGC | 84 | 895 |
| 1063255 | N/A | N/A | 4582 | 4597 | CGGCTTCCTGCACTGT | 85 | 896 |
| 1063287 | N/A | N/A | 4713 | 4728 | GCCAGAGCTAAGAATT | 64 | 897 |
| 1063319 | N/A | N/A | 5093 | 5108 | TCCGAACAAGGGCCTG | 25 | 898 |
| 1063351 | N/A | N/A | 5277 | 5292 | GGAGTATAGAAGGGTT | 35 | 899 |
| 1063383 | N/A | N/A | 5497 | 5512 | CTGGAAGGGACTGCCC | 67 | 900 |
| 1063415 | N/A | N/A | 5685 | 5700 | CCTCAAATGCCCACTC | 65 | 901 |
| 1063447 | N/A | N/A | 5857 | 5872 | CAAGGAGGCGAGTCCA | 74 | 902 |
| 1063479 | N/A | N/A | 6014 | 6029 | GGAAGGACCGAGCTGA | 40 | 903 |
| 1063511 | N/A | N/A | 6136 | 6151 | AAGGCGAGAAGTGGGT | 24 | 904 |
| 1063543 | N/A | N/A | 6290 | 6305 | TCGGACTTTCTCCTCG | 45 | 905 |
| 1063575 | N/A | N/A | 6466 | 6481 | GCAGAGGTCCAGCACC | 70 | 906 |
| 1063607 | N/A | N/A | 6982 | 6997 | TCGGCACCTGTAGGTC | 87 | 907 |
| 1063639 | N/A | N/A | 7173 | 7188 | CTACAATACGGCCTCC | 62 | 908 |
| 1063671 | N/A | N/A | 7378 | 7393 | GCACTGCAAGCCCACA | 40 | 909 |
| 1063703 | N/A | N/A | 7804 | 7819 | GGCTGAGGTGTTACCA | 46 | 910 |
| 1063735 | N/A | N/A | 8000 | 8015 | GTAAAGCTCTGTGGTT | 19 | 911 |
| 1063767 | N/A | N/A | 8047 | 8062 | AAGCTTAAAGACGGCC | 59 | 912 |
| 1063798 | N/A | N/A | 8562 | 8577 | ACTACTTATTGGGATG | 90 | 913 |
| 1063830 | N/A | N/A | 8851 | 8866 | GGAGTAGCAGGGCAAA | 50 | 914 |
| 1063862 | N/A | N/A | 9053 | 9068 | GCTAAGGGTTGTGTGT | 58 | 915 |
| 1063894 | N/A | N/A | 9417 | 9432 | GCAGTGCCTAAGTAGG | 87 | 916 |
| 1063926 | N/A | N/A | 9685 | 9700 | ATGAGGCCTCAGCCTG | 100 | 917 |
| 1063958 | N/A | N/A | 9962 | 9977 | TCAGAGGGTTTGTAAG | 49 | 918 |
| 1063990 | N/A | N/A | 10542 | 10557 | TTCGCATCATGAGAAA | 101 | 919 |
| 1064022 | N/A | N/A | 11114 | 11129 | GGCTTAAACTTCCCAC | 91 | 920 |
| 1064054 | N/A | N/A | 11382 | 11397 | AGCATGGAGCTCCTTT | 38 | 921 |
| 1064086 | N/A | N/A | 11552 | 11567 | TGAGGCATGGCCCCAA | 106 | 922 |
| 1064120 | N/A | N/A | 11652 | 11667 | ATTTTCCTTGGTCAGG | 30 | 923 |
| 1064152 | N/A | N/A | 11727 | 11742 | TCTGATCCCTGCTAAG | 74 | 924 |
| 1064184 | N/A | N/A | 11805 | 11820 | GTTGAAAAGAAGCGGA | 30 | 925 |
| 1064216 | N/A | N/A | 11916 | 11931 | TCTCACCGTCAACACC | 81 | 926 |
| 1064248 | N/A | N/A | 11981 | 11996 | CATGCAGGACCTCCTA | 59 | 927 |
| 1064280 | N/A | N/A | 12201 | 12216 | TGGGAATGGAGGAACC | 68 | 928 |
| 1064312 | N/A | N/A | 12394 | 12409 | ATTTTATGGGTCCAGG | 27 | 929 |
| 1064344 | N/A | N/A | 12582 | 12597 | AAGGATCAAATGGGTG | 70 | 930 |
| 1064376 | N/A | N/A | 12785 | 12800 | ACAGAGTCAGCGATGA | 75 | 931 |
| 1064408 | N/A | N/A | 12926 | 12941 | TTGAATTATCGAGTAT | 83 | 932 |
| 1064440 | N/A | N/A | 13220 | 13235 | GGTAAGGGATCAGGAC | 70 | 933 |

TABLE 17
Inhibition of Foxp3 mRNA by 3-10-3 cEt gapmers targeting SEQ ID NO.: 1, and 2

| Compound | SEQ ID NO: 1 | SEQ ID NO: 1 | SEQ ID NO: 2 | SEQ ID NO: 2 | Sequence | FOXP3 | SEQ |
|---|---|---|---|---|---|---|---|
| Number | Start Site | Stop Site | Start Site | Stop Site | (5′ to 3′) | (% UTC) | ID NO |
| 910956 | 1800 | 1815 | 14210 | 14225 | AGTAATCTGTGCGAGC | 18 | 250 |
| 911144 | N/A | N/A | 7355 | 7370 | TGCTATGATCATCCCC | 35 | 65 |
| 1062013 | 13 | 28 | 413 | 428 | ATCCAAATTTTTTTCG | 83 | 934 |
| 1062045 | 150 | 165 | 550 | 565 | TTGGTGAAGTGGACTG | 84 | 935 |
| 1062077 | 320 | 335 | 6858 | 6873 | ATCTCGGCCCTGGAAG | 114 | 936 |
| 1062109 | 466 | 481 | 7531 | 7546 | TCCTGGAGGAGTGCCT | 91 | 937 |
| 1062141 | 635 | 650 | N/A | N/A | GTTGATCCCAGGTGGG | 45 | 938 |
| 1062173 | 799 | 814 | 8445 | 8460 | TCGAAGACCTTCTCAC | 105 | 939 |
| 1062205 | 945 | 960 | 9740 | 9755 | CCTGCATGGCACTCAG | 104 | 940 |
| 1062237 | 1103 | 1118 | 11259 | 11274 | CCTCCGGACAGCAAAC | 133 | 941 |
| 1062269 | 1256 | 1271 | 13486 | 13501 | ATTGAGTGTCCGCTGC | 34* | 942 |
| 1062301 | 1454 | 1469 | 13864 | 13879 | AGGGTTGGAACACCTG | 160 | 943 |
| 1062333 | 1742 | 1757 | 14152 | 14167 | TGGCTGCAGGGCTCGA | 57 | 944 |
| 1062365 | 1897 | 1912 | 14307 | 14322 | AGTGTACTGAGGCAGG | 25 | 945 |
| 1062397 | 2063 | 2078 | 14473 | 14488 | CTGAGGGTACTGACGC | 13 | 946 |
| 1062429 | 2270 | 2285 | N/A | N/A | GCATGGATCAGGGCTC | 69 | 947 |
| 1062461 | N/A | N/A | 8324 | 8339 | GGCGAGGATCCTTCCC | 117 | 948 |
| 1062493 | N/A | N/A | 13613 | 13628 | GCCCACTTTGAGCTGC | 122 | 949 |
| 1062525 | N/A | N/A | 559 | 574 | ACACTCACCTTGGTGA | 152 | 950 |
| 1062557 | N/A | N/A | 692 | 707 | AAAGACCTTACCTGGC | 41 | 951 |
| 1062589 | N/A | N/A | 929 | 944 | GCATCAAGAGCTAAGA | 109 | 952 |
| 1062621 | N/A | N/A | 1116 | 1131 | GGAAAGGAGATCGATG | 120 | 953 |
| 1062653 | N/A | N/A | 1267 | 1282 | GGTGAACAGAACTGAT | 77 | 954 |
| 1062686 | N/A | N/A | 1351 | 1366 | CAAGGGTCTCCTCTAA | 114 | 955 |
| 1062718 | N/A | N/A | 1496 | 1511 | CTGCAGAATCGAGCTC | 54 | 956 |
| 1062750 | N/A | N/A | 1747 | 1762 | GAGAAACAACCGGAAT | 91 | 957 |
| 1062782 | N/A | N/A | 1896 | 1911 | TAAGTAGAGGGAGCAT | 39 | 958 |
| 1062814 | N/A | N/A | 2083 | 2098 | ATGAACACCCTATTAG | 96 | 959 |
| 1062846 | N/A | N/A | 2256 | 2271 | AACCTATTTGACTGTA | 93 | 960 |
| 1062878 | N/A | N/A | 2409 | 2424 | CAGTACCCACACTCTT | 100 | 961 |
| 1062910 | N/A | N/A | 2625 | 2640 | CCTAATGCTGATCTTG | 72 | 962 |
| 1062942 | N/A | N/A | 2742 | 2757 | GTTATTGAGTGAATAG | 74 | 963 |
| 1062974 | N/A | N/A | 2952 | 2967 | GGGTATTGAATTGTAT | 69 | 964 |
| 1063006 | N/A | N/A | 3151 | 3166 | CAAAGAGCGAGCAAGA | 85 | 965 |
| 1063038 | N/A | N/A | 3254 | 3269 | TGGTTAAGTCATTAGG | 6 | 966 |
| 1063070 | N/A | N/A | 3399 | 3414 | CTAGAGTCCTGAGATC | 82 | 967 |
| 1063102 | N/A | N/A | 3714 | 3729 | CCACAATCAAGGTTTT | 47 | 968 |
| 1063134 | N/A | N/A | 3947 | 3962 | ATAGGGCCTCTTGCCT | 117 | 969 |
| 1063166 | N/A | N/A | 4129 | 4144 | CAAATAGTATAACACC | 101 | 970 |
| 1063198 | N/A | N/A | 4338 | 4353 | CCGAGAACTGGCTGCC | 51 | 971 |
| 1063229 | N/A | N/A | 4439 | 4454 | GATTTTTCCGCCATTG | 120 | 972 |
| 1063261 | N/A | N/A | 4610 | 4625 | GAGGACCTAGAGGGCC | 100 | 973 |
| 1063293 | N/A | N/A | 4725 | 4740 | CCTGGACACTTGGCCA | 142 | 974 |
| 1063325 | N/A | N/A | 5139 | 5154 | TTAGAACATTACTGCG | 46 | 975 |
| 1063357 | N/A | N/A | 5370 | 5385 | TAAACTCTCTGGTGTG | 88 | 976 |
| 1063389 | N/A | N/A | 5528 | 5543 | CCTATAATCCTGGTCT | 43 | 977 |
| 1063421 | N/A | N/A | 5744 | 5759 | CCCCATCAGAGTTCAC | 59 | 978 |
| 1063453 | N/A | N/A | 5870 | 5885 | CTGGATCTCAGGGCAA | 93 | 979 |
| 1063485 | N/A | N/A | 6020 | 6035 | GCAGCTGGAAGGACCG | 78 | 980 |
| 1063517 | N/A | N/A | 6192 | 6207 | TGTAACAGTCCTGGCA | 118 | 981 |
| 1063549 | N/A | N/A | 6377 | 6392 | CCACTTGAGAGCTGTT | 46 | 982 |
| 1063581 | N/A | N/A | 6585 | 6600 | CTGGGACATGTCCCGA | 159 | 983 |
| 1063613 | N/A | N/A | 6989 | 7004 | GTAAAGGTCGGCACCT | 113 | 984 |
| 1063645 | N/A | N/A | 7240 | 7255 | ACCTACTTGGCCCCAG | 67 | 985 |
| 1063677 | N/A | N/A | 7427 | 7442 | TGAGAGGCCATCCTGA | 93 | 986 |
| 1063709 | N/A | N/A | 7872 | 7887 | AGAATAGCCTACACTG | 88 | 987 |
| 1063741 | N/A | N/A | 8013 | 8028 | TTTGACTAGCTTTGTA | 65 | 988 |
| 1063773 | N/A | N/A | 8109 | 8124 | CCTCGAAAACCCTGAC | 39 | 989 |
| 1063804 | N/A | N/A | 8582 | 8597 | GAGTTTAGCTCTTGCA | 20 | 990 |
| 1063836 | N/A | N/A | 8863 | 8878 | ATGTTGGCATGAGGAG | 70 | 991 |
| 1063868 | N/A | N/A | 9108 | 9123 | GGGACGGCCTGTGCAA | 104 | 992 |
| 1063900 | N/A | N/A | 9524 | 9539 | CTTACCCTCCACCGCC | 83 | 993 |
| 1063932 | N/A | N/A | 9692 | 9707 | CACAAACATGAGGCCT | 45 | 994 |
| 1063964 | N/A | N/A | 10306 | 10321 | CTCAGGATCACAGTGT | 47 | 995 |
| 1063996 | N/A | N/A | 10580 | 10595 | CCTAAACCCCCCTGGC | 124 | 996 |
| 1064028 | N/A | N/A | 11121 | 11136 | ACCCAGAGGCTTAAAC | 111 | 997 |
| 1064060 | N/A | N/A | 11450 | 11465 | GTGAGCGGATGCATTT | 60 | 998 |
| 1064092 | N/A | N/A | 11577 | 11592 | TATAGTAGCTGGAGTC | 65 | 999 |
| 1064126 | N/A | N/A | 11658 | 11673 | ACCCCGATTTTCCTTG | 74 | 1000 |
| 1064158 | N/A | N/A | 11741 | 11756 | TGACAGTCAAGGTCTC | 113 | 1001 |
| 1064190 | N/A | N/A | 11823 | 11838 | AAAATAGTTCTCCCCG | 41 | 1002 |
| 1064222 | N/A | N/A | 11926 | 11941 | AGGCCTGAGATCTCAC | 70 | 1003 |
| 1064254 | N/A | N/A | 11993 | 12008 | TGAATCAAGCCCCATG | 125 | 1004 |
| 1064286 | N/A | N/A | 12283 | 12298 | GGATTTGCGGACAGGT | 16 | 1005 |
| 1064318 | N/A | N/A | 12434 | 12449 | CGTTTAGGGCAAGGTG | 97 | 1006 |
| 1064350 | N/A | N/A | 12616 | 12631 | TGAGATGAAGGAGTTG | 142 | 1007 |
| 1064382 | N/A | N/A | 12795 | 12810 | GAATGGGATTACAGAG | 92 | 1008 |
| 1064414 | N/A | N/A | 12952 | 12967 | GCTTTAGGTCAGAAGC | 105 | 1009 |
| 1064446 | N/A | N/A | 13226 | 13241 | GGATTAGGTAAGGGAT | 105 | 1010 |

TABLE 18
Inhibition of Foxp3 mRNA by 3-10-3 cEt gapmers targeting SEQ ID NO.: 1, and 2

| Compound | SEQ ID NO: 1 | SEQ ID NO: 1 | SEQ ID NO: 2 | SEQ ID NO: 2 | Sequence | FOXP3 | SEQ |
|---|---|---|---|---|---|---|---|
| Number | Start Site | Stop Site | Start Site | Stop Site | (5′ to 3′) | (% UTC) | ID NO |
| 910956 | 1800 | 1815 | 14210 | 14225 | AGTAATCTGTGCGAGC | 18 | 250 |
| 911144 | N/A | N/A | 7355 | 7370 | TGCTATGATCATCCCC | 42 | 65 |
| 1062014 | 35 | 50 | 435 | 450 | CGCAGACCTCTCTCTT | 57 | 1011 |
| 1062046 | 151 | 166 | 551 | 566 | CTTGGTGAAGTGGACT | 67 | 1012 |
| 1062078 | 321 | 336 | 6859 | 6874 | GATCTCGGCCCTGGAA | 33 | 1013 |
| 1062110 | 467 | 482 | 7532 | 7547 | GTCCTGGAGGAGTGCC | 69 | 1014 |
| 1062142 | 658 | 673 | 8235 | 8250 | GACACCCATTCCAGGC | 78 | 1015 |
| 1062174 | 800 | 815 | 8446 | 8461 | TTCGAAGACCTTCTCA | 131 | 1016 |
| 1062206 | 979 | 994 | 9774 | 9789 | GCCTTGGTCAGTGCCA | 36 | 1017 |
| 1062238 | 1104 | 1119 | 11260 | 11275 | GCCTCCGGACAGCAAA | 98 | 1018 |
| 1062270 | 1258 | 1273 | 13488 | 13503 | TCATTGAGTGTCCGCT | 75* | 1019 |
| 1062302 | 1455 | 1470 | 13865 | 13880 | TAGGGTTGGAACACCT | 82 | 1020 |
| 1062334 | 1743 | 1758 | 14153 | 14168 | TTGGCTGCAGGGCTCG | 30 | 1021 |
| 1062366 | 1898 | 1913 | 14308 | 14323 | GAGTGTACTGAGGCAG | 12 | 1022 |
| 1062398 | 2064 | 2079 | 14474 | 14489 | CCTGAGGGTACTGACG | 49 | 1023 |
| 1062430 | 2271 | 2286 | N/A | N/A | GGCATGGATCAGGGCT | 75 | 1024 |
| 1062462 | N/A | N/A | 8325 | 8340 | GGGCGAGGATCCTTCC | 53 | 1025 |
| 1062494 | N/A | N/A | 13634 | 13649 | TATGAGCCCAGACCCA | 95 | 1026 |
| 1062526 | N/A | N/A | 560 | 575 | GACACTCACCTTGGTG | 96 | 1027 |
| 1062558 | N/A | N/A | 693 | 708 | TAAAGACCTTACCTGG | 87 | 1028 |
| 1062590 | N/A | N/A | 931 | 946 | AGGCATCAAGAGCTAA | 107 | 1029 |
| 1062622 | N/A | N/A | 1117 | 1132 | AGGAAAGGAGATCGAT | 107 | 1030 |
| 1062654 | N/A | N/A | 1268 | 1283 | GGGTGAACAGAACTGA | 56 | 1031 |
| 1062687 | N/A | N/A | 1352 | 1367 | CCAAGGGTCTCCTCTA | 95 | 1032 |
| 1062719 | N/A | N/A | 1497 | 1512 | CCTGCAGAATCGAGCT | 68 | 1033 |
| 1062751 | N/A | N/A | 1748 | 1763 | CGAGAAACAACCGGAA | 69 | 1034 |
| 1062783 | N/A | N/A | 1897 | 1912 | TTAAGTAGAGGGAGCA | 25 | 1035 |
| 1062815 | N/A | N/A | 2084 | 2099 | GATGAACACCCTATTA | 126 | 1036 |
| 1062847 | N/A | N/A | 2258 | 2273 | CTAACCTATTTGACTG | 70 | 1037 |
| 1062879 | N/A | N/A | 2410 | 2425 | CCAGTACCCACACTCT | 85 | 1038 |
| 1062911 | N/A | N/A | 2626 | 2641 | ACCTAATGCTGATCTT | 72 | 1039 |
| 1062943 | N/A | N/A | 2748 | 2763 | GATAAAGTTATTGAGT | 79 | 1040 |
| 1062975 | N/A | N/A | 2953 | 2968 | TGGGTATTGAATTGTA | 43 | 1041 |
| 1063007 | N/A | N/A | 3152 | 3167 | ACAAAGAGCGAGCAAG | 136 | 1042 |
| 1063039 | N/A | N/A | 3255 | 3270 | CTGGTTAAGTCATTAG | 26 | 1043 |
| 1063071 | N/A | N/A | 3401 | 3416 | ACCTAGAGTCCTGAGA | 132 | 1044 |
| 1063103 | N/A | N/A | 3716 | 3731 | CCCCACAATCAAGGTT | 78 | 1045 |
| 1063135 | N/A | N/A | 3949 | 3964 | TCATAGGGCCTCTTGC | 92 | 1046 |
| 1063167 | N/A | N/A | 4132 | 4147 | CTTCAAATAGTATAAC | 101 | 1047 |
| 1063199 | N/A | N/A | 4339 | 4354 | TCCGAGAACTGGCTGC | 62 | 1048 |
| 1063230 | N/A | N/A | 4440 | 4455 | AGATTTTTCCGCCATT | 102 | 1049 |
| 1063262 | N/A | N/A | 4611 | 4626 | AGAGGACCTAGAGGGC | 66 | 1050 |
| 1063294 | N/A | N/A | 4726 | 4741 | GCCTGGACACTTGGCC | 41 | 1051 |
| 1063326 | N/A | N/A | 5140 | 5155 | CTTAGAACATTACTGC | 33 | 1052 |
| 1063358 | N/A | N/A | 5398 | 5413 | TAGGAAGTGTTTCCGT | 82 | 1053 |
| 1063390 | N/A | N/A | 5529 | 5544 | TCCTATAATCCTGGTC | 103 | 1054 |
| 1063422 | N/A | N/A | 5765 | 5780 | GTAGAAGCTTCTCTAC | 100 | 1055 |
| 1063454 | N/A | N/A | 5923 | 5938 | CTGGCATTAAATATGT | 94 | 1056 |
| 1063486 | N/A | N/A | 6030 | 6045 | TTTAGCTTGAGCAGCT | 100 | 1057 |
| 1063518 | N/A | N/A | 6193 | 6208 | TTGTAACAGTCCTGGC | 44 | 1058 |
| 1063550 | N/A | N/A | 6378 | 6393 | TCCACTTGAGAGCTGT | 52 | 1059 |
| 1063582 | N/A | N/A | 6586 | 6601 | GCTGGGACATGTCCCG | 84 | 1060 |
| 1063614 | N/A | N/A | 6990 | 7005 | AGTAAAGGTCGGCACC | 98 | 1061 |
| 1063646 | N/A | N/A | 7244 | 7259 | CCTCACCTACTTGGCC | 32 | 1062 |
| 1063678 | N/A | N/A | 7428 | 7443 | GTGAGAGGCCATCCTG | 85 | 1063 |
| 1063710 | N/A | N/A | 7873 | 7888 | CAGAATAGCCTACACT | 85 | 1064 |
| 1063742 | N/A | N/A | 8015 | 8030 | ATTTTGACTAGCTTTG | 53 | 1065 |
| 1063774 | N/A | N/A | 8110 | 8125 | GCCTCGAAAACCCTGA | 30 | 1066 |
| 1063805 | N/A | N/A | 8587 | 8602 | TCTCAGAGTTTAGCTC | 60 | 1067 |
| 1063837 | N/A | N/A | 8864 | 8879 | CATGTTGGCATGAGGA | 40 | 1068 |
| 1063869 | N/A | N/A | 9110 | 9125 | GAGGGACGGCCTGTGC | 108 | 1069 |
| 1063901 | N/A | N/A | 9525 | 9540 | CCTTACCCTCCACCGC | 35 | 1070 |
| 1063933 | N/A | N/A | 9693 | 9708 | GCACAAACATGAGGCC | 111 | 1071 |
| 1063965 | N/A | N/A | 10307 | 10322 | ACTCAGGATCACAGTG | 77 | 1072 |
| 1063997 | N/A | N/A | 10581 | 10596 | ACCTAAACCCCCCTGG | 75 | 1073 |
| 1064029 | N/A | N/A | 11124 | 11139 | GTGACCCAGAGGCTTA | 105 | 1074 |
| 1064061 | N/A | N/A | 11451 | 11466 | TGTGAGCGGATGCATT | 80 | 1075 |
| 1064093 | N/A | N/A | 11578 | 11593 | ATATAGTAGCTGGAGT | 71 | 1076 |
| 1064127 | N/A | N/A | 11659 | 11674 | CACCCCGATTTTCCTT | 66 | 1077 |
| 1064159 | N/A | N/A | 11743 | 11758 | GATGACAGTCAAGGTC | 70 | 1078 |
| 1064191 | N/A | N/A | 11824 | 11839 | CAAAATAGTTCTCCCC | 30 | 1079 |
| 1064223 | N/A | N/A | 11929 | 11944 | TACAGGCCTGAGATCT | 69 | 1080 |
| 1064255 | N/A | N/A | 11995 | 12010 | GATGAATCAAGCCCCA | 55 | 1081 |
| 1064287 | N/A | N/A | 12296 | 12311 | GTGGTTTAGGTTTGGA | 13 | 1082 |
| 1064319 | N/A | N/A | 12453 | 12468 | TAGAGTAAGAGCTGGG | 64 | 1083 |
| 1064351 | N/A | N/A | 12638 | 12653 | TCTGAGAAGGCATTGG | 73 | 1084 |
| 1064383 | N/A | N/A | 12809 | 12824 | CAGTTTGGATTCAGGA | 55 | 1085 |
| 1064415 | N/A | N/A | 12953 | 12968 | GGCTTTAGGTCAGAAG | 133 | 1086 |
| 1064447 | N/A | N/A | 13229 | 13244 | CTGGGATTAGGTAAGG | 110 | 1087 |

TABLE 19
Inhibition of Foxp3 mRNA by 3-10-3 cEt gapmers targeting SEQ ID NO.: 1, and 2

| Compound | SEQ ID NO: 1 | SEQ ID NO: 1 | SEQ ID NO: 2 | SEQ ID NO: 2 | Sequence | FOXP3 | SEQ |
|---|---|---|---|---|---|---|---|
| Number | Start Site | Stop Site | Start Site | Stop Site | (5′ to 3′) | (% UTC) | ID NO |
| 910956 | 1800 | 1815 | 14210 | 14225 | AGTAATCTGTGCGAGC | 33 | 250 |
| 911144 | N/A | N/A | 7355 | 7370 | TGCTATGATCATCCCC | 36 | 65 |
| 1062015 | 37 | 52 | 437 | 452 | GCCGCAGACCTCTCTC | 32 | 1088 |
| 1062047 | 153 | 168 | N/A | N/A | GGCTTGGTGAAGTGGA | 48 | 1089 |
| 1062079 | 322 | 337 | 6860 | 6875 | AGATCTCGGCCCTGGA | 122 | 1090 |
| 1062111 | 483 | 498 | 7548 | 7563 | GCATGAAATGTGGCCT | 120 | 1091 |
| 1062143 | 661 | 676 | 8238 | 8253 | CTGGACACCCATTCCA | 126 | 1092 |
| 1062175 | 801 | 816 | 8447 | 8462 | CTTCGAAGACCTTCTC | 103 | 1093 |
| 1062207 | 980 | 995 | 9775 | 9790 | AGCCTTGGTCAGTGCC | 125 | 1094 |
| 1062239 | 1111 | 1126 | 11267 | 11282 | CACAGGTGCCTCCGGA | 165 | 1095 |
| 1062271 | 1259 | 1274 | 13489 | 13504 | CTCATTGAGTGTCCGC | 79* | 1096 |
| 1062303 | 1456 | 1471 | 13866 | 13881 | GTAGGGTTGGAACACC | 140 | 1097 |
| 1062335 | 1744 | 1759 | 14154 | 14169 | TTTGGCTGCAGGGCTC | 35 | 1098 |
| 1062367 | 1899 | 1914 | 14309 | 14324 | TGAGTGTACTGAGGCA | 31 | 1099 |
| 1062399 | 2065 | 2080 | 14475 | 14490 | TCCTGAGGGTACTGAC | 108 | 1100 |
| 1062431 | 2273 | 2288 | N/A | N/A | GAGGCATGGATCAGGG | 42 | 1101 |
| 1062463 | N/A | N/A | 8326 | 8341 | AGGGCGAGGATCCTTC | 106 | 1102 |
| 1062495 | N/A | N/A | 13636 | 13651 | CCTATGAGCCCAGACC | 144 | 1103 |
| 1062527 | N/A | N/A | 561 | 576 | GGACACTCACCTTGGT | 113 | 1104 |
| 1062559 | N/A | N/A | 694 | 709 | TTAAAGACCTTACCTG | 116 | 1105 |
| 1062591 | N/A | N/A | 932 | 947 | GAGGCATCAAGAGCTA | 90 | 1106 |
| 1062623 | N/A | N/A | 1119 | 1134 | GGAGGAAAGGAGATCG | 149 | 1107 |
| 1062655 | N/A | N/A | 1271 | 1286 | CTAGGGTGAACAGAAC | 55 | 1108 |
| 1062688 | N/A | N/A | 1358 | 1373 | CCCGCCCCAAGGGTCT | 56 | 1109 |
| 1062720 | N/A | N/A | 1503 | 1518 | GCTAAGCCTGCAGAAT | 96 | 1110 |
| 1062752 | N/A | N/A | 1749 | 1764 | ACGAGAAACAACCGGA | 130 | 1111 |
| 1062784 | N/A | N/A | 1907 | 1922 | TAGGGTTAGCTTAAGT | 46 | 1112 |
| 1062816 | N/A | N/A | 2085 | 2100 | AGATGAACACCCTATT | 72 | 1113 |
| 1062848 | N/A | N/A | 2259 | 2274 | ACTAACCTATTTGACT | 89 | 1114 |
| 1062880 | N/A | N/A | 2411 | 2426 | TCCAGTACCCACACTC | 83 | 1115 |
| 1062912 | N/A | N/A | 2627 | 2642 | CACCTAATGCTGATCT | 63 | 1116 |
| 1062944 | N/A | N/A | 2761 | 2776 | TAATTAGGGAGAAGAT | 101 | 1117 |
| 1062976 | N/A | N/A | 2954 | 2969 | CTGGGTATTGAATTGT | 57 | 1118 |
| 1063008 | N/A | N/A | 3153 | 3168 | CACAAAGAGCGAGCAA | 108 | 1119 |
| 1063040 | N/A | N/A | 3256 | 3271 | TCTGGTTAAGTCATTA | 76 | 1120 |
| 1063072 | N/A | N/A | 3402 | 3417 | CACCTAGAGTCCTGAG | 130 | 1121 |
| 1063104 | N/A | N/A | 3739 | 3754 | CATCATCAGACTCTCT | 114 | 1122 |
| 1063136 | N/A | N/A | 3950 | 3965 | TTCATAGGGCCTCTTG | 74 | 1123 |
| 1063168 | N/A | N/A | 4151 | 4166 | ATACTGGGACCCCTGG | 123 | 1124 |
| 1063200 | N/A | N/A | 4340 | 4355 | TTCCGAGAACTGGCTG | 48 | 1125 |
| 1063231 | N/A | N/A | 4441 | 4456 | CAGATTTTTCCGCCAT | 84 | 1126 |
| 1063263 | N/A | N/A | 4613 | 4628 | GTAGAGGACCTAGAGG | 50 | 1127 |
| 1063295 | N/A | N/A | 4742 | 4757 | GGTCACTTCTGAAGCT | 71 | 1128 |
| 1063327 | N/A | N/A | 5142 | 5157 | GGCTTAGAACATTACT | 98 | 1129 |
| 1063359 | N/A | N/A | 5399 | 5414 | TTAGGAAGTGTTTCCG | 109 | 1130 |
| 1063391 | N/A | N/A | 5530 | 5545 | ATCCTATAATCCTGGT | 128 | 1131 |
| 1063423 | N/A | N/A | 5768 | 5783 | CCTGTAGAAGCTTCTC | 82 | 1132 |
| 1063455 | N/A | N/A | 5930 | 5945 | GAAGAGTCTGGCATTA | 73 | 1133 |
| 1063487 | N/A | N/A | 6031 | 6046 | TTTTAGCTTGAGCAGC | 174 | 1134 |
| 1063519 | N/A | N/A | 6194 | 6209 | ATTGTAACAGTCCTGG | 54 | 1135 |
| 1063551 | N/A | N/A | 6379 | 6394 | CTCCACTTGAGAGCTG | 81 | 1136 |
| 1063583 | N/A | N/A | 6587 | 6602 | GGCTGGGACATGTCCC | 147 | 1137 |
| 1063615 | N/A | N/A | 6991 | 7006 | CAGTAAAGGTCGGCAC | 188 | 1138 |
| 1063647 | N/A | N/A | 7305 | 7320 | TCGAGTAACTTTTTAA | 44 | 1139 |
| 1063679 | N/A | N/A | 7429 | 7444 | GGTGAGAGGCCATCCT | 108 | 1140 |
| 1063711 | N/A | N/A | 7874 | 7889 | TCAGAATAGCCTACAC | 121 | 1141 |
| 1063743 | N/A | N/A | 8017 | 8032 | ACATTTTGACTAGCTT | 40 | 1142 |
| 1063775 | N/A | N/A | 8111 | 8126 | AGCCTCGAAAACCCTG | 145 | 1143 |
| 1063806 | N/A | N/A | 8597 | 8612 | GAACCCACAGTCTCAG | 110 | 1144 |
| 1063838 | N/A | N/A | 8875 | 8890 | AATAAGGCTGGCATGT | 110 | 1145 |
| 1063870 | N/A | N/A | 9113 | 9128 | GTGGAGGGACGGCCTG | 92 | 1146 |
| 1063902 | N/A | N/A | 9535 | 9550 | TATCCCTATCCCTTAC | 180 | 1147 |
| 1063934 | N/A | N/A | 9694 | 9709 | GGCACAAACATGAGGC | 117 | 1148 |
| 1063966 | N/A | N/A | 10310 | 10325 | ACAACTCAGGATCACA | 62 | 1149 |
| 1063998 | N/A | N/A | 10582 | 10597 | CACCTAAACCCCCCTG | 114 | 1150 |
| 1064030 | N/A | N/A | 11157 | 11172 | GTCGGATGATGCCTGG | 81 | 1151 |
| 1064062 | N/A | N/A | 11452 | 11467 | TTGTGAGCGGATGCAT | 91 | 1152 |
| 1064094 | N/A | N/A | 11579 | 11594 | AATATAGTAGCTGGAG | 43 | 1153 |
| 1064128 | N/A | N/A | 11660 | 11675 | CCACCCCGATTTTCCT | 125 | 1154 |
| 1064160 | N/A | N/A | 11744 | 11759 | GGATGACAGTCAAGGT | 50 | 1155 |
| 1064192 | N/A | N/A | 11827 | 11842 | TGCCAAAATAGTTCTC | 88 | 1156 |
| 1064224 | N/A | N/A | 11930 | 11945 | CTACAGGCCTGAGATC | 114 | 1157 |
| 1064256 | N/A | N/A | 11996 | 12011 | GGATGAATCAAGCCCC | 97 | 1158 |
| 1064288 | N/A | N/A | 12318 | 12333 | TTGGCATGCTCTGGCC | 118 | 1159 |
| 1064320 | N/A | N/A | 12455 | 12470 | GTTAGAGTAAGAGCTG | 101 | 1160 |
| 1064352 | N/A | N/A | 12639 | 12654 | TTCTGAGAAGGCATTG | 118 | 1161 |
| 1064384 | N/A | N/A | 12822 | 12837 | CAGGGAATTTGATCAG | 92 | 1162 |
| 1064416 | N/A | N/A | 12961 | 12976 | GATGACTTGGCTTTAG | 83 | 1163 |
| 1064448 | N/A | N/A | 13240 | 13255 | GTATGGTTGTTCTGGG | 101 | 1164 |

TABLE 20
Inhibition of Foxp3 mRNA by 3-10-3 cEt gapmers targeting SEQ ID NO.: 1, and 2

| Compound | SEQ ID NO: 1 | SEQ ID NO: 1 | SEQ ID NO: 2 | SEQ ID NO: 2 | Sequence | FOXP3 | SEQ |
|---|---|---|---|---|---|---|---|
| Number | Start Site | Stop Site | Start Site | Stop Site | (5′ to 3′) | (% UTC) | ID NO |
| 910956 | 1800 | 1815 | 14210 | 14225 | AGTAATCTGTGCGAGC | 23 | 250 |
| 911144 | N/A | N/A | 7355 | 7370 | TGCTATGATCATCCCC | 40 | 65 |
| 1062016 | 40 | 55 | 440 | 455 | GAAGCCGCAGACCTCT | 53 | 1165 |
| 1062048 | 156 | 171 | N/A | N/A | GCAGGCTTGGTGAAGT | 48 | 1166 |
| 1062080 | 323 | 338 | 6861 | 6876 | AAGATCTCGGCCCTGG | 131 | 1167 |
| 1062112 | 484 | 499 | 7549 | 7564 | TGCATGAAATGTGGCC | 39 | 1168 |
| 1062144 | 662 | 677 | 8239 | 8254 | CCTGGACACCCATTCC | 42 | 1169 |
| 1062176 | 802 | 817 | 8448 | 8463 | TCTTCGAAGACCTTCT | 76 | 1170 |
| 1062208 | 981 | 996 | 9776 | 9791 | AAGCCTTGGTCAGTGC | 92 | 1171 |
| 1062240 | 1112 | 1127 | 11268 | 11283 | CCACAGGTGCCTCCGG | 49 | 1172 |
| 1062272 | 1261 | 1276 | 13491 | 13506 | ATCTCATTGAGTGTCC | 74* | 1173 |
| 1062304 | 1460 | 1475 | 13870 | 13885 | AGGTGTAGGGTTGGAA | 41 | 1174 |
| 1062336 | 1746 | 1761 | 14156 | 14171 | TGTTTGGCTGCAGGGC | 19 | 1175 |
| 1062368 | 1900 | 1915 | 14310 | 14325 | TTGAGTGTACTGAGGC | 3 | 1176 |
| 1062400 | 2068 | 2083 | 14478 | 14493 | AGATCCTGAGGGTACT | 72 | 1177 |
| 1062432 | 2274 | 2289 | N/A | N/A | TGAGGCATGGATCAGG | 54 | 1178 |
| 1062464 | N/A | N/A | 8327 | 8342 | GAGGGCGAGGATCCTT | 40 | 1179 |
| 1062496 | N/A | N/A | 13637 | 13652 | GCCTATGAGCCCAGAC | 67 | 1180 |
| 1062528 | N/A | N/A | 567 | 582 | GAGCAGGGACACTCAC | 210 | 1181 |
| 1062560 | N/A | N/A | 728 | 743 | TAAGTCTTCTGCCATT | 23 | 1182 |
| 1062592 | N/A | N/A | 937 | 952 | GATGAGAGGCATCAAG | 140 | 1183 |
| 1062624 | N/A | N/A | 1142 | 1157 | CAAGAAAAGAGAGCGG | 39 | 1184 |
| 1062656 | N/A | N/A | 1273 | 1288 | TACTAGGGTGAACAGA | 77 | 1185 |
| 1062689 | N/A | N/A | 1393 | 1408 | TACGGTTGACAATGGT | 36 | 1186 |
| 1062721 | N/A | N/A | 1533 | 1548 | CGTGAGCACTTACTTT | 80 | 1187 |
| 1062753 | N/A | N/A | 1750 | 1765 | AACGAGAAACAACCGG | 26 | 1188 |
| 1062785 | N/A | N/A | 1908 | 1923 | CTAGGGTTAGCTTAAG | 81 | 1189 |
| 1062817 | N/A | N/A | 2086 | 2101 | AAGATGAACACCCTAT | 78 | 1190 |
| 1062849 | N/A | N/A | 2260 | 2275 | GACTAACCTATTTGAC | 66 | 1191 |
| 1062881 | N/A | N/A | 2419 | 2434 | AGTCTGGCTCCAGTAC | 89 | 1192 |
| 1062913 | N/A | N/A | 2628 | 2643 | ACACCTAATGCTGATC | 95 | 1193 |
| 1062945 | N/A | N/A | 2763 | 2778 | GATAATTAGGGAGAAG | 30 | 1194 |
| 1062977 | N/A | N/A | 2955 | 2970 | GCTGGGTATTGAATTG | 75 | 1195 |
| 1063009 | N/A | N/A | 3154 | 3169 | ACACAAAGAGCGAGCA | 119 | 1196 |
| 1063041 | N/A | N/A | 3257 | 3272 | GTCTGGTTAAGTCATT | 67 | 1197 |
| 1063073 | N/A | N/A | 3405 | 3420 | TCCCACCTAGAGTCCT | 78 | 1198 |
| 1063105 | N/A | N/A | 3742 | 3757 | GCCCATCATCAGACTC | 34 | 1199 |
| 1063137 | N/A | N/A | 3951 | 3966 | CTTCATAGGGCCTCTT | 35 | 1200 |
| 1063169 | N/A | N/A | 4152 | 4167 | GATACTGGGACCCCTG | 38 | 1201 |
| 1063201 | N/A | N/A | 4356 | 4371 | CACCCCACAGGTTTCG | 46 | 1202 |
| 1063232 | N/A | N/A | 4443 | 4458 | CCCAGATTTTTCCGCC | 70 | 1203 |
| 1063264 | N/A | N/A | 4631 | 4646 | GAGATGATCTGTCTGG | 47 | 1204 |
| 1063296 | N/A | N/A | 4800 | 4815 | ATTTCGGTGCAAATGG | 54 | 1205 |
| 1063328 | N/A | N/A | 5143 | 5158 | GGGCTTAGAACATTAC | 65 | 1206 |
| 1063360 | N/A | N/A | 5416 | 5431 | GAACTCCACTTCTTTC | 52 | 1207 |
| 1063392 | N/A | N/A | 5592 | 5607 | TCCGGGCCCCCTGCTG | 65 | 1208 |
| 1063424 | N/A | N/A | 5769 | 5784 | GCCTGTAGAAGCTTCT | 97 | 1209 |
| 1063456 | N/A | N/A | 5931 | 5946 | TGAAGAGTCTGGCATT | 179 | 1210 |
| 1063488 | N/A | N/A | 6032 | 6047 | GTTTTAGCTTGAGCAG | 31 | 1211 |
| 1063520 | N/A | N/A | 6195 | 6210 | TATTGTAACAGTCCTG | 30 | 1212 |
| 1063552 | N/A | N/A | 6381 | 6396 | CCCTCCACTTGAGAGC | 33 | 1213 |
| 1063584 | N/A | N/A | 6589 | 6604 | TTGGCTGGGACATGTC | 39 | 1214 |
| 1063616 | N/A | N/A | 6993 | 7008 | CACAGTAAAGGTCGGC | 71 | 1215 |
| 1063648 | N/A | N/A | 7306 | 7321 | ATCGAGTAACTTTTTA | 14 | 1216 |
| 1063680 | N/A | N/A | 7430 | 7445 | GGGTGAGAGGCCATCC | 229 | 1217 |
| 1063712 | N/A | N/A | 7876 | 7891 | ATTCAGAATAGCCTAC | 105 | 1218 |
| 1063744 | N/A | N/A | 8018 | 8033 | GACATTTTGACTAGCT | 5 | 1219 |
| 1063776 | N/A | N/A | 8115 | 8130 | CCTGAGCCTCGAAAAC | 72 | 1220 |
| 1063807 | N/A | N/A | 8599 | 8614 | TTGAACCCACAGTCTC | 44 | 1221 |
| 1063839 | N/A | N/A | 8876 | 8891 | GAATAAGGCTGGCATG | 90 | 1222 |
| 1063871 | N/A | N/A | 9172 | 9187 | TTGGAAGTGTGGTGAG | 49 | 1223 |
| 1063903 | N/A | N/A | 9536 | 9551 | CTATCCCTATCCCTTA | 56 | 1224 |
| 1063935 | N/A | N/A | 9695 | 9710 | TGGCACAAACATGAGG | 131 | 1225 |
| 1063967 | N/A | N/A | 10312 | 10327 | TAACAACTCAGGATCA | 28 | 1226 |
| 1063999 | N/A | N/A | 10583 | 10598 | TCACCTAAACCCCCCT | 34 | 1227 |
| 1064031 | N/A | N/A | 11159 | 11174 | TTGTCGGATGATGCCT | 33 | 1228 |
| 1064063 | N/A | N/A | 11455 | 11470 | CTTTTGTGAGCGGATG | 50 | 1229 |
| 1064095 | N/A | N/A | 11580 | 11595 | GAATATAGTAGCTGGA | 12 | 1230 |
| 1064129 | N/A | N/A | 11661 | 11676 | TCCACCCCGATTTTCC | 177 | 1231 |
| 1064161 | N/A | N/A | 11747 | 11762 | CCAGGATGACAGTCAA | 26 | 1232 |
| 1064193 | N/A | N/A | 11848 | 11863 | ATTTATTCTTTGCACC | 75 | 1233 |
| 1064225 | N/A | N/A | 11931 | 11946 | TCTACAGGCCTGAGAT | 77 | 1234 |
| 1064257 | N/A | N/A | 12017 | 12032 | AGGAACTCTGTCAGAG | 39 | 1235 |
| 1064289 | N/A | N/A | 12321 | 12336 | AATTTGGCATGCTCTG | 186 | 1236 |
| 1064321 | N/A | N/A | 12456 | 12471 | AGTTAGAGTAAGAGCT | 160 | 1237 |
| 1064353 | N/A | N/A | 12647 | 12662 | GATGAAGGTTCTGAGA | 39 | 1238 |
| 1064385 | N/A | N/A | 12824 | 12839 | GTCAGGGAATTTGATC | 89 | 1239 |
| 1064417 | N/A | N/A | 12965 | 12980 | ATGGGATGACTTGGCT | 81 | 1240 |
| 1064449 | N/A | N/A | 13243 | 13258 | TGGGTATGGTTGTTCT | 42 | 1241 |

TABLE 21
Inhibition of Foxp3 mRNA by 3-10-3 cEt gapmers targeting SEQ ID NO.: 1, and 2

| Compound | SEQ ID NO: 1 | SEQ ID NO: 1 | SEQ ID NO: 2 | SEQ ID NO: 2 | Sequence | FOXP3 | SEQ |
|---|---|---|---|---|---|---|---|
| Number | Start Site | Stop Site | Start Site | Stop Site | (5′ to 3′) | (% UTC) | ID NO |
| 910950 | 1434 | 1449 | 13844 | 13859 | GCCTCTGGCTCCGTTT | 109 | 94 |
| 911144 | N/A | N/A | 7355 | 7370 | TGCTATGATCATCCCC | 12 | 65 |
| 1062017 | 44 | 59 | 444 | 459 | TGTGGAAGCCGCAGAC | 32 | 1242 |
| 1062049 | 161 | 176 | N/A | N/A | CAAGGGCAGGCTTGGT | 120 | 1243 |
| 1062081 | 325 | 340 | 6863 | 6878 | CGAAGATCTCGGCCCT | 52 | 1244 |
| 1062113 | 486 | 501 | 7551 | 7566 | GGTGCATGAAATGTGG | 34 | 1245 |
| 1062145 | 663 | 678 | 8240 | 8255 | CCCTGGACACCCATTC | 57 | 1246 |
| 1062177 | 803 | 818 | 8449 | 8464 | CTCTTCGAAGACCTTC | 127 | 1247 |
| 1062209 | 982 | 997 | 9777 | 9792 | GAAGCCTTGGTCAGTG | 35 | 1248 |
| 1062241 | 1116 | 1131 | 11272 | 11287 | TACCCCACAGGTGCCT | 53 | 1249 |
| 1062273 | 1268 | 1283 | 13498 | 13513 | GTGGTAGATCTCATTG | 61* | 1250 |
| 1062305 | 1461 | 1476 | 13871 | 13886 | CAGGTGTAGGGTTGGA | 18 | 1251 |
| 1062337 | 1756 | 1771 | 14166 | 14181 | GTGAAGGCTCTGTTTG | 37 | 1252 |
| 1062369 | 1902 | 1917 | 14312 | 14327 | GTTTGAGTGTACTGAG | 23 | 1253 |
| 1062401 | 2070 | 2085 | 14480 | 14495 | TCAGATCCTGAGGGTA | 123 | 1254 |
| 1062433 | 2275 | 2290 | N/A | N/A | CTGAGGCATGGATCAG | 36 | 1255 |
| 1062465 | N/A | N/A | 8328 | 8343 | GGAGGGCGAGGATCCT | 100 | 1256 |
| 1062497 | N/A | N/A | 13642 | 13657 | AATGTGCCTATGAGCC | 136 | 1257 |
| 1062529 | N/A | N/A | 624 | 639 | CCCGCCGTGCCTACCT | 21 | 1258 |
| 1062561 | N/A | N/A | 740 | 755 | GTACTTCACCTTTAAG | 33 | 1259 |
| 1062593 | N/A | N/A | 938 | 953 | GGATGAGAGGCATCAA | 54 | 1260 |
| 1062625 | N/A | N/A | 1143 | 1158 | GCAAGAAAAGAGAGCG | 127 | 1261 |
| 1062657 | N/A | N/A | 1274 | 1289 | CTACTAGGGTGAACAG | 60 | 1262 |
| 1062690 | N/A | N/A | 1394 | 1409 | CTACGGTTGACAATGG | 44 | 1263 |
| 1062722 | N/A | N/A | 1570 | 1585 | TCTAATTTGGTTACAG | 55 | 1264 |
| 1062754 | N/A | N/A | 1751 | 1766 | AAACGAGAAACAACCG | 40 | 1265 |
| 1062786 | N/A | N/A | 1910 | 1925 | ACCTAGGGTTAGCTTA | 93 | 1266 |
| 1062818 | N/A | N/A | 2087 | 2102 | TAAGATGAACACCCTA | 125 | 1267 |
| 1062850 | N/A | N/A | 2261 | 2276 | AGACTAACCTATTTGA | 41 | 1268 |
| 1062882 | N/A | N/A | 2436 | 2451 | CTGGGTTTGTCCCAGA | 119 | 1269 |
| 1062914 | N/A | N/A | 2630 | 2645 | TAACACCTAATGCTGA | 128 | 1270 |
| 1062946 | N/A | N/A | 2767 | 2782 | CTGAGATAATTAGGGA | 52 | 1271 |
| 1062978 | N/A | N/A | 2956 | 2971 | GGCTGGGTATTGAATT | 36 | 1272 |
| 1063010 | N/A | N/A | 3155 | 3170 | CACACAAAGAGCGAGC | 45 | 1273 |
| 1063042 | N/A | N/A | 3267 | 3282 | CTTCTACGCTGTCTGG | 57 | 1274 |
| 1063074 | N/A | N/A | 3425 | 3440 | GGAGAGAGCCAGAACC | 30 | 1275 |
| 1063106 | N/A | N/A | 3748 | 3763 | TACAGAGCCCATCATC | 52 | 1276 |
| 1063138 | N/A | N/A | 3968 | 3983 | AGTCAGGCAGCTTGCT | 42 | 1277 |
| 1063170 | N/A | N/A | 4153 | 4168 | AGATACTGGGACCCCT | 69 | 1278 |
| 1063202 | N/A | N/A | 4363 | 4378 | GATACCCCACCCCACA | 142 | 1279 |
| 1063233 | N/A | N/A | 4444 | 4459 | GCCCAGATTTTTCCGC | 51 | 1280 |
| 1063265 | N/A | N/A | 4632 | 4647 | GGAGATGATCTGTCTG | 72 | 1281 |
| 1063297 | N/A | N/A | 4801 | 4816 | GATTTCGGTGCAAATG | 95 | 1282 |
| 1063329 | N/A | N/A | 5159 | 5174 | GTTCTTAGTCTCCTGG | 20 | 1283 |
| 1063361 | N/A | N/A | 5418 | 5433 | GAGAACTCCACTTCTT | 121 | 1284 |
| 1063393 | N/A | N/A | 5602 | 5617 | CCACAATGGCTCCGGG | 51 | 1285 |
| 1063425 | N/A | N/A | 5818 | 5833 | AGCATGGCAAGTGACA | 41 | 1286 |
| 1063457 | N/A | N/A | 5932 | 5947 | ATGAAGAGTCTGGCAT | 130 | 1287 |
| 1063489 | N/A | N/A | 6033 | 6048 | GGTTTTAGCTTGAGCA | 63 | 1288 |
| 1063521 | N/A | N/A | 6196 | 6211 | CTATTGTAACAGTCCT | 86 | 1289 |
| 1063553 | N/A | N/A | 6395 | 6410 | CAATGGTTGTTTCCCC | 33 | 1290 |
| 1063585 | N/A | N/A | 6592 | 6607 | GCATTGGCTGGGACAT | 93 | 1291 |
| 1063617 | N/A | N/A | 6994 | 7009 | CCACAGTAAAGGTCGG | 46 | 1292 |
| 1063649 | N/A | N/A | 7307 | 7322 | GATCGAGTAACTTTTT | 16 | 1293 |
| 1063681 | N/A | N/A | 7555 | 7570 | ACCTGGTGCATGAAAT | 50 | 1294 |
| 1063713 | N/A | N/A | 7878 | 7893 | CAATTCAGAATAGCCT | 53 | 1295 |
| 1063745 | N/A | N/A | 8019 | 8034 | TGACATTTTGACTAGC | 25 | 1296 |
| 1063777 | N/A | N/A | 8134 | 8149 | ATTTTGAGCTTCCCAC | 146 | 1297 |
| 1063808 | N/A | N/A | 8600 | 8615 | TTTGAACCCACAGTCT | 160 | 1298 |
| 1063840 | N/A | N/A | 8877 | 8892 | GGAATAAGGCTGGCAT | 46 | 1299 |
| 1063872 | N/A | N/A | 9181 | 9196 | GAGATAATGTTGGAAG | 97 | 1300 |
| 1063904 | N/A | N/A | 9537 | 9552 | ACTATCCCTATCCCTT | 95 | 1301 |
| 1063936 | N/A | N/A | 9787 | 9802 | CACCACAGATGAAGCC | 48 | 1302 |
| 1063968 | N/A | N/A | 10313 | 10328 | TTAACAACTCAGGATC | 145 | 1303 |
| 1064000 | N/A | N/A | 10585 | 10600 | AGTCACCTAAACCCCC | 87 | 1304 |
| 1064032 | N/A | N/A | 11300 | 11315 | TTACCTGGGAATGTGC | 50 | 1305 |
| 1064064 | N/A | N/A | 11456 | 11471 | GCTTTTGTGAGCGGAT | 27 | 1306 |
| 1064096 | N/A | N/A | 11581 | 11596 | CGAATATAGTAGCTGG | 21 | 1307 |
| 1064130 | N/A | N/A | 11662 | 11677 | ATCCACCCCGATTTTC | 111 | 1308 |
| 1064162 | N/A | N/A | 11769 | 11784 | TGCAAGAGGTTAAATG | 129 | 1309 |
| 1064194 | N/A | N/A | 11861 | 11876 | CATAAGTTGTATCATT | 116 | 1310 |
| 1064226 | N/A | N/A | 11932 | 11947 | GTCTACAGGCCTGAGA | 51 | 1311 |
| 1064258 | N/A | N/A | 12018 | 12033 | GAGGAACTCTGTCAGA | 122 | 1312 |
| 1064290 | N/A | N/A | 12322 | 12337 | GAATTTGGCATGCTCT | 50 | 1313 |
| 1064322 | N/A | N/A | 12457 | 12472 | GAGTTAGAGTAAGAGC | 51 | 1314 |
| 1064354 | N/A | N/A | 12648 | 12663 | GGATGAAGGTTCTGAG | 89 | 1315 |
| 1064386 | N/A | N/A | 12825 | 12840 | GGTCAGGGAATTTGAT | 134 | 1316 |
| 1064418 | N/A | N/A | 13014 | 13029 | TTAAGAGTCAGGCTGG | 59 | 1317 |
| 1064450 | N/A | N/A | 13244 | 13259 | GTGGGTATGGTTGTTC | 90 | 1318 |

TABLE 22
Inhibition of Foxp3 mRNA by 3-10-3 cEt gapmers targeting SEQ ID NO.: 1, and 2

| Compound | SEQ ID NO: 1 | SEQ ID NO: 1 | SEQ ID NO: 2 | SEQ ID NO: 2 | Sequence | FOXP3 | SEQ |
|---|---|---|---|---|---|---|---|
| Number | Start Site | Stop Site | Start Site | Stop Site | (5′ to 3′) | % UTC) | ID NO |
| 910950 | 1434 | 1449 | 13844 | 13859 | GCCTCTGGCTCCGTTT | 109 | 94 |
| 911144 | N/A | N/A | 7355 | 7370 | TGCTATGATCATCCCC | 21 | 65 |
| 1062018 | 46 | 61 | 446 | 461 | GGTGTGGAAGCCGCAG | 49 | 1319 |
| 1062050 | 172 | 187 | 6710 | 6725 | GGGTCCTTGTCCAAGG | 43 | 1320 |
| 1062082 | 328 | 343 | 6866 | 6881 | CCTCGAAGATCTCGGC | 112 | 1321 |
| 1062114 | 487 | 502 | 7552 | 7567 | TGGTGCATGAAATGTG | 137 | 1322 |
| 1062146 | 664 | 679 | 8241 | 8256 | TCCCTGGACACCCATT | 37 | 1323 |
| 1062178 | 804 | 819 | 8450 | 8465 | GCTCTTCGAAGACCTT | 35 | 1324 |
| 1062210 | 984 | 999 | 9779 | 9794 | ATGAAGCCTTGGTCAG | 52 | 1325 |
| 1062242 | 1117 | 1132 | 11273 | 11288 | CTACCCCACAGGTGCC | 80 | 1326 |
| 1062274 | 1293 | 1308 | 13523 | 13538 | AGAAGGCAAACATGCG | 41 | 1327 |
| 1062306 | 1463 | 1478 | 13873 | 13888 | GCCAGGTGTAGGGTTG | 35 | 1328 |
| 1062338 | 1757 | 1772 | 14167 | 14182 | TGTGAAGGCTCTGTTT | 86 | 1329 |
| 1062370 | 1903 | 1918 | 14313 | 14328 | TGTTTGAGTGTACTGA | 46 | 1330 |
| 1062402 | 2071 | 2086 | 14481 | 14496 | CTCAGATCCTGAGGGT | 88 | 1331 |
| 1062434 | 2276 | 2291 | N/A | N/A | GCTGAGGCATGGATCA | 41 | 1332 |
| 1062466 | N/A | N/A | 8329 | 8344 | AGGAGGGCGAGGATCC | 43 | 1333 |
| 1062498 | N/A | N/A | 13645 | 13660 | CCCAATGTGCCTATGA | 55 | 1334 |
| 1062530 | N/A | N/A | 643 | 658 | CCAGAGGGCCCCTGAC | 52 | 1335 |
| 1062562 | N/A | N/A | 741 | 756 | AGTACTTCACCTTTAA | 17 | 1336 |
| 1062594 | N/A | N/A | 940 | 955 | AAGGATGAGAGGCATC | 158 | 1337 |
| 1062626 | N/A | N/A | 1180 | 1195 | TAGGCTGGATGCTGGC | 167 | 1338 |
| 1062658 | N/A | N/A | 1276 | 1291 | TGCTACTAGGGTGAAC | 126 | 1339 |
| 1062691 | N/A | N/A | 1395 | 1410 | ACTACGGTTGACAATG | 39 | 1340 |
| 1062723 | N/A | N/A | 1576 | 1591 | CATGATTCTAATTTGG | 21 | 1341 |
| 1062755 | N/A | N/A | 1773 | 1788 | AGTCAGGGATGTTTAT | 50 | 1342 |
| 1062787 | N/A | N/A | 1911 | 1926 | CACCTAGGGTTAGCTT | 134 | 1343 |
| 1062819 | N/A | N/A | 2088 | 2103 | ATAAGATGAACACCCT | 42 | 1344 |
| 1062851 | N/A | N/A | 2262 | 2277 | AAGACTAACCTATTTG | 48 | 1345 |
| 1062883 | N/A | N/A | 2437 | 2452 | GCTGGGTTTGTCCCAG | 71 | 1346 |
| 1062915 | N/A | N/A | 2632 | 2647 | TTTAACACCTAATGCT | 98 | 1347 |
| 1062947 | N/A | N/A | 2768 | 2783 | TCTGAGATAATTAGGG | 101 | 1348 |
| 1062979 | N/A | N/A | 2958 | 2973 | ATGGCTGGGTATTGAA | 24 | 1349 |
| 1063011 | N/A | N/A | 3178 | 3193 | GGATACATAGAGACAA | 57 | 1350 |
| 1063043 | N/A | N/A | 3276 | 3291 | GCCAGGGCCCTTCTAC | 114 | 1351 |
| 1063107 | N/A | N/A | 3750 | 3765 | AATACAGAGCCCATCA | 50 | 1352 |
| 1063139 | N/A | N/A | 3971 | 3986 | GAAAGTCAGGCAGCTT | 43 | 1353 |
| 1063171 | N/A | N/A | 4156 | 4171 | CACAGATACTGGGACC | 60 | 1354 |
| 1063203 | N/A | N/A | 4366 | 4381 | GCAGATACCCCACCCC | 24 | 1355 |
| 1063234 | N/A | N/A | 4449 | 4464 | GACTTGCCCAGATTTT | 28 | 1356 |
| 1063266 | N/A | N/A | 4633 | 4648 | TGGAGATGATCTGTCT | 48 | 1357 |
| 1063298 | N/A | N/A | 4802 | 4817 | CGATTTCGGTGCAAAT | 37 | 1358 |
| 1063330 | N/A | N/A | 5160 | 5175 | AGTTCTTAGTCTCCTG | 9 | 1359 |
| 1063362 | N/A | N/A | 5420 | 5435 | TTGAGAACTCCACTTC | 70 | 1360 |
| 1063394 | N/A | N/A | 5606 | 5621 | CCCTCCACAATGGCTC | 28 | 1361 |
| 1063426 | N/A | N/A | 5820 | 5835 | CCAGCATGGCAAGTGA | 46 | 1362 |
| 1063458 | N/A | N/A | 5933 | 5948 | CATGAAGAGTCTGGCA | 32 | 1363 |
| 1063490 | N/A | N/A | 6034 | 6049 | GGGTTTTAGCTTGAGC | 35 | 1364 |
| 1063522 | N/A | N/A | 6198 | 6213 | GGCTATTGTAACAGTC | 112 | 1365 |
| 1063554 | N/A | N/A | 6398 | 6413 | GGGCAATGGTTGTTTC | 82 | 1366 |
| 1063586 | N/A | N/A | 6593 | 6608 | GGCATTGGCTGGGACA | 110 | 1367 |
| 1063618 | N/A | N/A | 6996 | 7011 | TGCCACAGTAAAGGTC | 47 | 1368 |
| 1063650 | N/A | N/A | 7308 | 7323 | AGATCGAGTAACTTTT | 8 | 1369 |
| 1063682 | N/A | N/A | 7556 | 7571 | TACCTGGTGCATGAAA | 58 | 1370 |
| 1063714 | N/A | N/A | 7879 | 7894 | GCAATTCAGAATAGCC | 49 | 1371 |
| 1063746 | N/A | N/A | 8020 | 8035 | CTGACATTTTGACTAG | 35 | 1372 |
| 1063778 | N/A | N/A | 8146 | 8161 | ACAAGGCCTCTCATTT | 58 | 1373 |
| 1063809 | N/A | N/A | 8623 | 8638 | GCCAGTCAGGGATGGA | 55 | 1374 |
| 1063841 | N/A | N/A | 8878 | 8893 | TGGAATAAGGCTGGCA | 37 | 1375 |
| 1063873 | N/A | N/A | 9203 | 9218 | CTTGAGCCTGGCCAGA | 87 | 1376 |
| 1063905 | N/A | N/A | 9539 | 9554 | GCACTATCCCTATCCC | 16 | 1377 |
| 1063937 | N/A | N/A | 9789 | 9804 | CTCACCACAGATGAAG | 62 | 1378 |
| 1063969 | N/A | N/A | 10314 | 10329 | TTTAACAACTCAGGAT | 72 | 1379 |
| 1064001 | N/A | N/A | 10588 | 10603 | GAAAGTCACCTAAACC | 35 | 1380 |
| 1064033 | N/A | N/A | 11302 | 11317 | TCTTACCTGGGAATGT | 145 | 1381 |
| 1064065 | N/A | N/A | 11457 | 11472 | AGCTTTTGTGAGCGGA | 54 | 1382 |
| 1064097 | N/A | N/A | 11582 | 11597 | CCGAATATAGTAGCTG | 54 | 1383 |
| 1064131 | N/A | N/A | 11664 | 11679 | GAATCCACCCCGATTT | 56 | 1384 |
| 1064163 | N/A | N/A | 11771 | 11786 | GATGCAAGAGGTTAAA | 43 | 1385 |
| 1064195 | N/A | N/A | 11863 | 11878 | GACATAAGTTGTATCA | 87 | 1386 |
| 1064227 | N/A | N/A | 11934 | 11949 | GAGTCTACAGGCCTGA | 38 | 1387 |
| 1064259 | N/A | N/A | 12019 | 12034 | GGAGGAACTCTGTCAG | 41 | 1388 |
| 1064291 | N/A | N/A | 12323 | 12338 | AGAATTTGGCATGCTC | 43 | 1389 |
| 1064323 | N/A | N/A | 12458 | 12473 | GGAGTTAGAGTAAGAG | 76 | 1390 |
| 1064355 | N/A | N/A | 12649 | 12664 | AGGATGAAGGTTCTGA | 77 | 1391 |
| 1064387 | N/A | N/A | 12847 | 12862 | TTCGGTGTGGAGTGAG | 82 | 1392 |
| 1064419 | N/A | N/A | 13016 | 13031 | GGTTAAGAGTCAGGCT | 40 | 1393 |
| 1064451 | N/A | N/A | 13245 | 13260 | TGTGGGTATGGTTGTT | 35 | 1394 |

TABLE 23
Inhibition of Foxp3 mRNA by 3-10-3 cEt gapmers targeting SEQ ID NO.: 1, and 2

| Compound | SEQ ID NO: 1 | SEQ ID NO: 1 | SEQ ID NO: 2 | SEQ ID NO: 2 | Sequence | FOXP3 | SEQ |
|---|---|---|---|---|---|---|---|
| Number | Start Site | Stop Site | Start Site | Stop Site | (5′ to 3′) | (% UTC) | ID NO |
| 910950 | 1434 | 1449 | 13844 | 13859 | GCCTCTGGCTCCGTTT | 200 | 94 |
| 911144 | N/A | N/A | 7355 | 7370 | TGCTATGATCATCCCC | 14 | 65 |
| 1062019 | 49 | 64 | 449 | 464 | TACGGTGTGGAAGCCG | 65 | 1395 |
| 1062051 | 174 | 189 | 6712 | 6727 | TCGGGTCCTTGTCCAA | 38 | 1396 |
| 1062083 | 329 | 344 | 6867 | 6882 | GCCTCGAAGATCTCGG | 67 | 1397 |
| 1062115 | 488 | 503 | 7553 | 7568 | CTGGTGCATGAAATGT | 62 | 1398 |
| 1062147 | 669 | 684 | 8246 | 8261 | CCGGCTCCCTGGACAC | 61 | 1399 |
| 1062179 | 810 | 825 | 8456 | 8471 | CCTCTGGCTCTTCGAA | 148 | 1400 |
| 1062211 | 987 | 1002 | 9782 | 9797 | CAGATGAAGCCTTGGT | 39 | 1401 |
| 1062243 | 1118 | 1133 | 11274 | 11289 | GCTACCCCACAGGTGC | 108 | 1402 |
| 1062275 | 1312 | 1327 | 13542 | 13557 | GTGGCAGGATGGTTTC | 52 | 1403 |
| 1062307 | 1482 | 1497 | 13892 | 13907 | CTTGATCTTGAGGTCA | 59 | 1404 |
| 1062339 | 1764 | 1779 | 14174 | 14189 | GGCTGGTTGTGAAGGC | 40 | 1405 |
| 1062371 | 1904 | 1919 | 14314 | 14329 | TTGTTTGAGTGTACTG | 64 | 1406 |
| 1062403 | 2076 | 2091 | 14486 | 14501 | GGGACCTCAGATCCTG | 78 | 1407 |
| 1062435 | 2283 | 2298 | N/A | N/A | AGTCTAAGCTGAGGCA | 68 | 1408 |
| 1062467 | N/A | N/A | 8330 | 8345 | TAGGAGGGCGAGGATC | 90 | 1409 |
| 1062499 | N/A | N/A | 13646 | 13661 | CCCCAATGTGCCTATG | 93 | 1410 |
| 1062531 | N/A | N/A | 644 | 659 | ACCAGAGGGCCCCTGA | 95 | 1411 |
| 1062563 | N/A | N/A | 742 | 757 | AAGTACTTCACCTTTA | 50 | 1412 |
| 1062595 | N/A | N/A | 1002 | 1017 | CGGGAGAAAGAGAGGC | 38 | 1413 |
| 1062627 | N/A | N/A | 1183 | 1198 | CTCTAGGCTGGATGCT | 65 | 1414 |
| 1062659 | N/A | N/A | 1287 | 1302 | TGCAATCCTCCTGCTA | 117 | 1415 |
| 1062692 | N/A | N/A | 1397 | 1412 | AAACTACGGTTGACAA | 71 | 1416 |
| 1062724 | N/A | N/A | 1577 | 1592 | GCATGATTCTAATTTG | 5 | 1417 |
| 1062756 | N/A | N/A | 1784 | 1799 | TCCAAGGAAGCAGTCA | 78 | 1418 |
| 1062788 | N/A | N/A | 1914 | 1929 | ACTCACCTAGGGTTAG | 92 | 1419 |
| 1062820 | N/A | N/A | 2089 | 2104 | AATAAGATGAACACCC | 73 | 1420 |
| 1062852 | N/A | N/A | 2305 | 2320 | GGACTTTCTAAGCACA | 48 | 1421 |
| 1062884 | N/A | N/A | 2438 | 2453 | CGCTGGGTTTGTCCCA | 65 | 1422 |
| 1062916 | N/A | N/A | 2634 | 2649 | GTTTTAACACCTAATG | 65 | 1423 |
| 1062948 | N/A | N/A | 2790 | 2805 | GGAGTATGGTTTAACA | 38 | 1424 |
| 1062980 | N/A | N/A | 2961 | 2976 | CCCATGGCTGGGTATT | 109 | 1425 |
| 1063012 | N/A | N/A | 3179 | 3194 | GGGATACATAGAGACA | 78 | 1426 |
| 1063044 | N/A | N/A | 3277 | 3292 | GGCCAGGGCCCTTCTA | 100 | 1427 |
| 1063076 | N/A | N/A | 3491 | 3506 | GAATGGTAGCCCAGGT | 64 | 1428 |
| 1063108 | N/A | N/A | 3751 | 3766 | CAATACAGAGCCCATC | 73 | 1429 |
| 1063140 | N/A | N/A | 3972 | 3987 | TGAAAGTCAGGCAGCT | 73 | 1430 |
| 1063172 | N/A | N/A | 4157 | 4172 | CCACAGATACTGGGAC | 97 | 1431 |
| 1063204 | N/A | N/A | 4367 | 4382 | GGCAGATACCCCACCC | 73 | 1432 |
| 1063235 | N/A | N/A | 4450 | 4465 | CGACTTGCCCAGATTT | 59 | 1433 |
| 1063267 | N/A | N/A | 4659 | 4674 | CATAGATACATTCTCA | 65 | 1434 |
| 1063299 | N/A | N/A | 4804 | 4819 | ACCGATTTCGGTGCAA | 65 | 1435 |
| 1063331 | N/A | N/A | 5161 | 5176 | AAGTTCTTAGTCTCCT | 19 | 1436 |
| 1063363 | N/A | N/A | 5421 | 5436 | CTTGAGAACTCCACTT | 69 | 1437 |
| 1063395 | N/A | N/A | 5609 | 5624 | AAGCCCTCCACAATGG | 53 | 1438 |
| 1063427 | N/A | N/A | 5821 | 5836 | TCCAGCATGGCAAGTG | 74 | 1439 |
| 1063459 | N/A | N/A | 5934 | 5949 | ACATGAAGAGTCTGGC | 37 | 1440 |
| 1063491 | N/A | N/A | 6036 | 6051 | ATGGGTTTTAGCTTGA | 21 | 1441 |
| 1063523 | N/A | N/A | 6199 | 6214 | AGGCTATTGTAACAGT | 52 | 1442 |
| 1063555 | N/A | N/A | 6399 | 6414 | AGGGCAATGGTTGTTT | 132 | 1443 |
| 1063587 | N/A | N/A | 6603 | 6618 | GGTCAAAGCAGGCATT | 30 | 1444 |
| 1063619 | N/A | N/A | 7005 | 7020 | CCCGCCCAGTGCCACA | 23 | 1445 |
| 1063651 | N/A | N/A | 7309 | 7324 | GAGATCGAGTAACTTT | 27 | 1446 |
| 1063683 | N/A | N/A | 7557 | 7572 | ATACCTGGTGCATGAA | 72 | 1447 |
| 1063715 | N/A | N/A | 7880 | 7895 | TGCAATTCAGAATAGC | 59 | 1448 |
| 1063747 | N/A | N/A | 8021 | 8036 | GCTGACATTTTGACTA | 63 | 1449 |
| 1063779 | N/A | N/A | 8147 | 8162 | CACAAGGCCTCTCATT | 78 | 1450 |
| 1063810 | N/A | N/A | 8658 | 8673 | CGAGAGAAGCTAAGTA | 71 | 1451 |
| 1063842 | N/A | N/A | 8879 | 8894 | GTGGAATAAGGCTGGC | 50 | 1452 |
| 1063874 | N/A | N/A | 9210 | 9225 | CTCACCACTTGAGCCT | 70 | 1453 |
| 1063906 | N/A | N/A | 9541 | 9556 | GCGCACTATCCCTATC | 74 | 1454 |
| 1063938 | N/A | N/A | 9790 | 9805 | GCTCACCACAGATGAA | 88 | 1455 |
| 1063970 | N/A | N/A | 10315 | 10330 | CTTTAACAACTCAGGA | 57 | 1456 |
| 1064002 | N/A | N/A | 10615 | 10630 | CTCTTTACCACCCAAC | 96 | 1457 |
| 1064034 | N/A | N/A | 11304 | 11319 | ATTCTTACCTGGGAAT | 110 | 1458 |
| 1064066 | N/A | N/A | 11458 | 11473 | AAGCTTTTGTGAGCGG | 79 | 1459 |
| 1064098 | N/A | N/A | 11583 | 11598 | GCCGAATATAGTAGCT | 70 | 1460 |
| 1064132 | N/A | N/A | 11665 | 11680 | CGAATCCACCCCGATT | 114 | 1461 |
| 1064164 | N/A | N/A | 11773 | 11788 | AGGATGCAAGAGGTTA | 45 | 1462 |
| 1064196 | N/A | N/A | 11865 | 11880 | CTGACATAAGTTGTAT | 117 | 1463 |
| 1064228 | N/A | N/A | 11936 | 11951 | GTGAGTCTACAGGCCT | 46 | 1464 |
| 1064260 | N/A | N/A | 12021 | 12036 | GTGGAGGAACTCTGTC | 78* | 1465 |
| 1064292 | N/A | N/A | 12325 | 12340 | TCAGAATTTGGCATGC | 59 | 1466 |
| 1064324 | N/A | N/A | 12459 | 12474 | AGGAGTTAGAGTAAGA | 97 | 1467 |
| 1064356 | N/A | N/A | 12650 | 12665 | TAGGATGAAGGTTCTG | 84 | 1468 |
| 1064388 | N/A | N/A | 12848 | 12863 | GTTCGGTGTGGAGTGA | 82 | 1469 |
| 1064420 | N/A | N/A | 13017 | 13032 | GGGTTAAGAGTCAGGC | 12 | 1470 |
| 1064452 | N/A | N/A | 13246 | 13261 | GTGTGGGTATGGTTGT | 66 | 1471 |

TABLE 24
Inhibition of Foxp3 mRNA by 3-10-3 cEt gapmers targeting SEQ ID NO.: 1, and 2

| Compound | SEQ ID NO: 1 | SEQ ID NO: 1 | SEQ ID NO: 2 | SEQ ID NO: 2 | Sequence | FOXP3 | SEQ |
|---|---|---|---|---|---|---|---|
| Number | Start Site | Stop Site | Start Site | Stop Site | (5′ to 3′) | (% UTC) | ID NO |
| 910950 | 1434 | 1449 | 13844 | 13859 | GCCTCTGGCTCCGTTT | 202 | 94 |
| 911144 | N/A | N/A | 7355 | 7370 | TGCTATGATCATCCCC | 30 | 65 |
| 1062020 | 50 | 65 | 450 | 465 | GTACGGTGTGGAAGCC | 41 | 1472 |
| 1062052 | 175 | 190 | 6713 | 6728 | ATCGGGTCCTTGTCCA | 37 | 1473 |
| 1062084 | 330 | 345 | 6868 | 6883 | CGCCTCGAAGATCTCG | 80 | 1474 |
| 1062116 | 490 | 505 | N/A | N/A | AGCTGGTGCATGAAAT | 104 | 1475 |
| 1062148 | 670 | 685 | 8247 | 8262 | GCCGGCTCCCTGGACA | 96 | 1476 |
| 1062180 | 811 | 826 | 8457 | 8472 | TCCTCTGGCTCTTCGA | 100 | 1477 |
| 1062212 | 999 | 1014 | N/A | N/A | CGGATGATGCCACAGA | 101 | 1478 |
| 1062244 | 1120 | 1135 | 11276 | 11291 | TGGCTACCCCACAGGT | 90 | 1479 |
| 1062276 | 1367 | 1382 | 13777 | 13792 | CACCCGCACAAAGCAC | 111 | 1480 |
| 1062308 | 1484 | 1499 | 13894 | 13909 | TCCTTGATCTTGAGGT | 113 | 1481 |
| 1062340 | 1790 | 1805 | 14200 | 14215 | GCGAGCAGCTGAGGCA | 70 | 1482 |
| 1062372 | 1906 | 1921 | 14316 | 14331 | GGTTGTTTGAGTGTAC | 9 | 1483 |
| 1062404 | 2077 | 2092 | 14487 | 14502 | TGGGACCTCAGATCCT | 72 | 1484 |
| 1062436 | 2284 | 2299 | N/A | N/A | CAGTCTAAGCTGAGGC | 42 | 1485 |
| 1062468 | N/A | N/A | 8331 | 8346 | ATAGGAGGGCGAGGAT | 114 | 1486 |
| 1062500 | N/A | N/A | 13647 | 13662 | TCCCCAATGTGCCTAT | 111 | 1487 |
| 1062532 | N/A | N/A | 645 | 660 | TACCAGAGGGCCCCTG | 99 | 1488 |
| 1062564 | N/A | N/A | 744 | 759 | TTAAGTACTTCACCTT | 56 | 1489 |
| 1062596 | N/A | N/A | 1006 | 1021 | ATGGCGGGAGAAAGAG | 36 | 1490 |
| 1062628 | N/A | N/A | 1184 | 1199 | GCTCTAGGCTGGATGC | 107 | 1491 |
| 1062660 | N/A | N/A | 1294 | 1309 | GGCACCTTGCAATCCT | 36 | 1492 |
| 1062693 | N/A | N/A | 1398 | 1413 | TAAACTACGGTTGACA | 114 | 1493 |
| 1062725 | N/A | N/A | 1587 | 1602 | CCAATATATAGCATGA | 22 | 1494 |
| 1062757 | N/A | N/A | 1785 | 1800 | ATCCAAGGAAGCAGTC | 88 | 1495 |
| 1062789 | N/A | N/A | 1917 | 1932 | AATACTCACCTAGGGT | 79 | 1496 |
| 1062821 | N/A | N/A | 2107 | 2122 | GCAAATCAATAAGGGA | 40 | 1497 |
| 1062853 | N/A | N/A | 2313 | 2328 | GTAGGAAAGGACTTTC | 76 | 1498 |
| 1062885 | N/A | N/A | 2459 | 2474 | CACACATAGGGCTTGG | 26 | 1499 |
| 1062917 | N/A | N/A | 2638 | 2653 | ATAAGTTTTAACACCT | 56 | 1500 |
| 1062949 | N/A | N/A | 2803 | 2818 | ACTGGAGGACCATGGA | 115 | 1501 |
| 1062981 | N/A | N/A | 2987 | 3002 | TAAAGAAGGGCAAGGT | 81 | 1502 |
| 1063013 | N/A | N/A | 3180 | 3195 | AGGGATACATAGAGAC | 88 | 1503 |
| 1063045 | N/A | N/A | 3288 | 3303 | GAGTAGACAAGGGCCA | 82 | 1504 |
| 1063077 | N/A | N/A | 3540 | 3555 | GTCCAACCTGTGGGAA | 118 | 1505 |
| 1063109 | N/A | N/A | 3752 | 3767 | CCAATACAGAGCCCAT | 74 | 1506 |
| 1063141 | N/A | N/A | 3986 | 4001 | TCCTTGGAACCATCTG | 48 | 1507 |
| 1063173 | N/A | N/A | 4159 | 4174 | CTCCACAGATACTGGG | 65 | 1508 |
| 1063205 | N/A | N/A | 4368 | 4383 | GGGCAGATACCCCACC | 92 | 1509 |
| 1063236 | N/A | N/A | 4452 | 4467 | CCCGACTTGCCCAGAT | 67 | 1510 |
| 1063268 | N/A | N/A | 4661 | 4676 | AGCATAGATACATTCT | 32 | 1511 |
| 1063300 | N/A | N/A | 4805 | 4820 | TACCGATTTCGGTGCA | 71 | 1512 |
| 1063332 | N/A | N/A | 5162 | 5177 | TAAGTTCTTAGTCTCC | 24 | 1513 |
| 1063364 | N/A | N/A | 5422 | 5437 | ACTTGAGAACTCCACT | 100 | 1514 |
| 1063396 | N/A | N/A | 5611 | 5626 | GAAAGCCCTCCACAAT | 98 | 1515 |
| 1063428 | N/A | N/A | 5822 | 5837 | ATCCAGCATGGCAAGT | 79 | 1516 |
| 1063460 | N/A | N/A | 5935 | 5950 | GACATGAAGAGTCTGG | 58 | 1517 |
| 1063492 | N/A | N/A | 6037 | 6052 | CATGGGTTTTAGCTTG | 78 | 1518 |
| 1063524 | N/A | N/A | 6200 | 6215 | GAGGCTATTGTAACAG | 53 | 1519 |
| 1063556 | N/A | N/A | 6400 | 6415 | GAGGGCAATGGTTGTT | 38 | 1520 |
| 1063588 | N/A | N/A | 6635 | 6650 | CTCGACCACCTGAGCC | 133 | 1521 |
| 1063620 | N/A | N/A | 7036 | 7051 | AACCACTTCCTGTGCC | 85 | 1522 |
| 1063652 | N/A | N/A | 7310 | 7325 | GGAGATCGAGTAACTT | 22 | 1523 |
| 1063684 | N/A | N/A | 7558 | 7573 | CATACCTGGTGCATGA | 97 | 1524 |
| 1063716 | N/A | N/A | 7881 | 7896 | CTGCAATTCAGAATAG | 66 | 1525 |
| 1063748 | N/A | N/A | 8028 | 8043 | CGCAGGTGCTGACATT | 56 | 1526 |
| 1063780 | N/A | N/A | 8148 | 8163 | CCACAAGGCCTCTCAT | 149 | 1527 |
| 1063811 | N/A | N/A | 8659 | 8674 | TCGAGAGAAGCTAAGT | 112 | 1528 |
| 1063843 | N/A | N/A | 8887 | 8902 | TGGGAACAGTGGAATA | 66 | 1529 |
| 1063875 | N/A | N/A | 9211 | 9226 | ACTCACCACTTGAGCC | 101 | 1530 |
| 1063907 | N/A | N/A | 9542 | 9557 | TGCGCACTATCCCTAT | 92 | 1531 |
| 1063939 | N/A | N/A | 9793 | 9808 | GTCGCTCACCACAGAT | 66 | 1532 |
| 1063971 | N/A | N/A | 10341 | 10356 | CTGGCAAGTCTGGCTA | 61 | 1533 |
| 1064003 | N/A | N/A | 10616 | 10631 | GCTCTTTACCACCCAA | 63 | 1534 |
| 1064035 | N/A | N/A | 11305 | 11320 | CATTCTTACCTGGGAA | 99 | 1535 |
| 1064067 | N/A | N/A | 11460 | 11475 | GGAAGCTTTTGTGAGC | 56 | 1536 |
| 1064099 | N/A | N/A | 11584 | 11599 | GGCCGAATATAGTAGC | 98 | 1537 |
| 1064133 | N/A | N/A | 11666 | 11681 | GCGAATCCACCCCGAT | 63 | 1538 |
| 1064165 | N/A | N/A | 11774 | 11789 | AAGGATGCAAGAGGTT | 78 | 1539 |
| 1064197 | N/A | N/A | 11866 | 11881 | CCTGACATAAGTTGTA | 86 | 1540 |
| 1064229 | N/A | N/A | 11941 | 11956 | ACAAGGTGAGTCTACA | 144 | 1541 |
| 1064261 | N/A | N/A | 12089 | 12104 | ACCCAGCGGATGAGCG | 39* | 1542 |
| 1064293 | N/A | N/A | 12326 | 12341 | GTCAGAATTTGGCATG | 75 | 1543 |
| 1064325 | N/A | N/A | 12460 | 12475 | AAGGAGTTAGAGTAAG | 171 | 1544 |
| 1064357 | N/A | N/A | 12651 | 12666 | CTAGGATGAAGGTTCT | 55 | 1545 |
| 1064389 | N/A | N/A | 12849 | 12864 | GGTTCGGTGTGGAGTG | 98 | 1546 |
| 1064421 | N/A | N/A | 13018 | 13033 | TGGGTTAAGAGTCAGG | 32 | 1547 |
| 1064453 | N/A | N/A | 13256 | 13271 | GGTTAGATGGGTGTGG | 82 | 1548 |

TABLE 25
Inhibition of Foxp3 mRNA by 3-10-3 cEt gapmers targeting SEQ ID NO.: 1, and 2

| Compound | SEQ ID NO: 1 | SEQ ID NO: 1 | SEQ ID NO: 2 | SEQ ID NO: 2 | Sequence | FOXP3 | SEQ |
|---|---|---|---|---|---|---|---|
| Number | Start Site | Stop Site | Start Site | Stop Site | (5′ to 3′) | (% UTC) | ID NO |
| 910950 | 1434 | 1449 | 13844 | 13859 | GCCTCTGGCTCCGTTT | 93 | 94 |
| 911144 | N/A | N/A | 7355 | 7370 | TGCTATGATCATCCCC | 49 | 65 |
| 1062021 | 51 | 66 | 451 | 466 | TGTACGGTGTGGAAGC | 40 | 1549 |
| 1062053 | 176 | 191 | 6714 | 6729 | CATCGGGTCCTTGTCC | 81 | 1550 |
| 1062085 | 331 | 346 | 6869 | 6884 | CCGCCTCGAAGATCTC | 67 | 1551 |
| 1062117 | 494 | 509 | N/A | N/A | TGAGAGCTGGTGCATG | 129 | 1552 |
| 1062149 | 672 | 687 | 8249 | 8264 | GTGCCGGCTCCCTGGA | 83 | 1553 |
| 1062181 | 816 | 831 | 8462 | 8477 | GGAAGTCCTCTGGCTC | 98 | 1554 |
| 1062213 | 1001 | 1016 | N/A | N/A | GTCGGATGATGCCACA | 85 | 1555 |
| 1062245 | 1124 | 1139 | 11280 | 11295 | TCCATGGCTACCCCAC | 115 | 1556 |
| 1062277 | 1368 | 1383 | 13778 | 13793 | CCACCCGCACAAAGCA | 114 | 1557 |
| 1062309 | 1485 | 1500 | 13895 | 13910 | TTCCTTGATCTTGAGG | 89 | 1558 |
| 1062341 | 1791 | 1806 | 14201 | 14216 | TGCGAGCAGCTGAGGC | 72 | 1559 |
| 1062373 | 1907 | 1922 | 14317 | 14332 | AGGTTGTTTGAGTGTA | 8 | 1560 |
| 1062405 | 2078 | 2093 | 14488 | 14503 | TTGGGACCTCAGATCC | 72 | 1561 |
| 1062437 | 2285 | 2300 | N/A | N/A | GCAGTCTAAGCTGAGG | 66 | 1562 |
| 1062469 | N/A | N/A | 8332 | 8347 | GATAGGAGGGCGAGGA | 128 | 1563 |
| 1062501 | N/A | N/A | 13648 | 13663 | CTCCCCAATGTGCCTA | 87 | 1564 |
| 1062533 | N/A | N/A | 663 | 678 | GCTGGGTACATCCCAC | 127 | 1565 |
| 1062565 | N/A | N/A | 746 | 761 | CATTAAGTACTTCACC | 104 | 1566 |
| 1062597 | N/A | N/A | 1007 | 1022 | GATGGCGGGAGAAAGA | 96 | 1567 |
| 1062629 | N/A | N/A | 1185 | 1200 | AGCTCTAGGCTGGATG | 108 | 1568 |
| 1062661 | N/A | N/A | 1297 | 1312 | CCCGGCACCTTGCAAT | 87 | 1569 |
| 1062694 | N/A | N/A | 1399 | 1414 | CTAAACTACGGTTGAC | 107 | 1570 |
| 1062726 | N/A | N/A | 1613 | 1628 | GTTAATTGAATAAAGC | 113 | 1571 |
| 1062758 | N/A | N/A | 1797 | 1812 | CCCTTTTCAGGAATCC | 81 | 1572 |
| 1062790 | N/A | N/A | 1918 | 1933 | TAATACTCACCTAGGG | 99 | 1573 |
| 1062822 | N/A | N/A | 2109 | 2124 | TGGCAAATCAATAAGG | 95 | 1574 |
| 1062854 | N/A | N/A | 2316 | 2331 | CAAGTAGGAAAGGACT | 101 | 1575 |
| 1062886 | N/A | N/A | 2460 | 2475 | TCACACATAGGGCTTG | 59 | 1576 |
| 1062918 | N/A | N/A | 2649 | 2664 | CCATTCAAGATATAAG | 50 | 1577 |
| 1062950 | N/A | N/A | 2804 | 2819 | AACTGGAGGACCATGG | 115 | 1578 |
| 1062982 | N/A | N/A | 3017 | 3032 | TCAACTGATGCTGCCT | 53 | 1579 |
| 1063014 | N/A | N/A | 3181 | 3196 | TAGGGATACATAGAGA | 121 | 1580 |
| 1063046 | N/A | N/A | 3308 | 3323 | ACTGAGCACGGAGAGG | 100 | 1581 |
| 1063078 | N/A | N/A | 3562 | 3577 | CCCCACACTGTGATCG | 76 | 1582 |
| 1063110 | N/A | N/A | 3754 | 3769 | CGCCAATACAGAGCCC | 109 | 1583 |
| 1063142 | N/A | N/A | 3987 | 4002 | CTCCTTGGAACCATCT | 56 | 1584 |
| 1063174 | N/A | N/A | 4163 | 4178 | CAGGCTCCACAGATAC | 85 | 1585 |
| 1063206 | N/A | N/A | 4369 | 4384 | AGGGCAGATACCCCAC | 158 | 1586 |
| 1063237 | N/A | N/A | 4454 | 4469 | CCCCCGACTTGCCCAG | 32 | 1587 |
| 1063269 | N/A | N/A | 4662 | 4677 | AAGCATAGATACATTC | 69 | 1588 |
| 1063301 | N/A | N/A | 4806 | 4821 | ATACCGATTTCGGTGC | 119 | 1589 |
| 1063333 | N/A | N/A | 5163 | 5178 | TTAAGTTCTTAGTCTC | 39 | 1590 |
| 1063365 | N/A | N/A | 5423 | 5438 | GACTTGAGAACTCCAC | 110 | 1591 |
| 1063397 | N/A | N/A | 5613 | 5628 | TTGAAAGCCCTCCACA | 119 | 1592 |
| 1063429 | N/A | N/A | 5826 | 5841 | ACGGATCCAGCATGGC | 35 | 1593 |
| 1063461 | N/A | N/A | 5936 | 5951 | AGACATGAAGAGTCTG | 114 | 1594 |
| 1063493 | N/A | N/A | 6048 | 6063 | AGTCAAAGTGACATGG | 71 | 1595 |
| 1063525 | N/A | N/A | 6202 | 6217 | AGGAGGCTATTGTAAC | 85 | 1596 |
| 1063557 | N/A | N/A | 6401 | 6416 | TGAGGGCAATGGTTGT | 79 | 1597 |
| 1063589 | N/A | N/A | 6636 | 6651 | ACTCGACCACCTGAGC | 140 | 1598 |
| 1063621 | N/A | N/A | 7043 | 7058 | ACCCAGAAACCACTTC | 112 | 1599 |
| 1063653 | N/A | N/A | 7311 | 7326 | TGGAGATCGAGTAACT | 23 | 1600 |
| 1063685 | N/A | N/A | 7559 | 7574 | CCATACCTGGTGCATG | 117 | 1601 |
| 1063717 | N/A | N/A | 7888 | 7903 | CAGAGTACTGCAATTC | 73 | 1602 |
| 1063749 | N/A | N/A | 8029 | 8044 | TCGCAGGTGCTGACAT | 97 | 1603 |
| 1063781 | N/A | N/A | 8185 | 8200 | ACCTATGGAGGCTGTG | 78 | 1604 |
| 1063812 | N/A | N/A | 8662 | 8677 | AGGTCGAGAGAAGCTA | 131 | 1605 |
| 1063844 | N/A | N/A | 8888 | 8903 | TTGGGAACAGTGGAAT | 119 | 1606 |
| 1063876 | N/A | N/A | 9228 | 9243 | CTGCATGTCAGGCCTG | 85 | 1607 |
| 1063908 | N/A | N/A | 9543 | 9558 | TTGCGCACTATCCCTA | 51 | 1608 |
| 1063940 | N/A | N/A | 9794 | 9809 | GGTCGCTCACCACAGA | 73 | 1609 |
| 1063972 | N/A | N/A | 10373 | 10388 | CATAGCTGGTCCTGCT | 61 | 1610 |
| 1064004 | N/A | N/A | 10621 | 10636 | ATAGGGCTCTTTACCA | 83 | 1611 |
| 1064036 | N/A | N/A | 11306 | 11321 | CCATTCTTACCTGGGA | 110 | 1612 |
| 1064068 | N/A | N/A | 11465 | 11480 | CGAAAGGAAGCTTTTG | 152 | 1613 |
| 1064100 | N/A | N/A | 11585 | 11600 | TGGCCGAATATAGTAG | 90 | 1614 |
| 1064134 | N/A | N/A | 11667 | 11682 | GGCGAATCCACCCCGA | 96 | 1615 |
| 1064166 | N/A | N/A | 11777 | 11792 | CCAAAGGATGCAAGAG | 115 | 1616 |
| 1064198 | N/A | N/A | 11867 | 11882 | ACCTGACATAAGTTGT | 119 | 1617 |
| 1064230 | N/A | N/A | 11942 | 11957 | TACAAGGTGAGTCTAC | 140 | 1618 |
| 1064262 | N/A | N/A | 12092 | 12107 | CTTACCCAGCGGATGA | 62 | 1619 |
| 1064294 | N/A | N/A | 12330 | 12345 | TAGGGTCAGAATTTGG | 60 | 1620 |
| 1064326 | N/A | N/A | 12461 | 12476 | GAAGGAGTTAGAGTAA | 140 | 1621 |
| 1064358 | N/A | N/A | 12652 | 12667 | GCTAGGATGAAGGTTC | 87 | 1622 |
| 1064390 | N/A | N/A | 12850 | 12865 | GGGTTCGGTGTGGAGT | 81 | 1623 |
| 1064422 | N/A | N/A | 13019 | 13034 | GTGGGTTAAGAGTCAG | 127 | 1624 |
| 1064454 | N/A | N/A | 13329 | 13344 | CAGGACTAGATGTGGG | 100 | 1625 |

TABLE 26
Inhibition of Foxp3 mRNA by 3-10-3 cEt gapmers targeting SEQ ID NO.: 1, and 2

| Compound | SEQ ID NO: 1 | SEQ ID NO: 1 | SEQ ID NO: 2 | SEQ ID NO: 2 | Sequence | FOXP3 | SEQ |
|---|---|---|---|---|---|---|---|
| Number | Start Site | Stop Site | Start Site | Stop Site | (5′ to 3′) | (% UTC) | ID NO |
| 910950 | 1434 | 1449 | 13844 | 13859 | GCCTCTGGCTCCGTTT | 179 | 94 |
| 911144 | N/A | N/A | 7355 | 7370 | TGCTATGATCATCCCC | 51 | 65 |
| 1062022 | 53 | 68 | 453 | 468 | GCTGTACGGTGTGGAA | 59 | 1626 |
| 1062054 | 177 | 192 | 6715 | 6730 | GCATCGGGTCCTTGTC | 112 | 1627 |
| 1062086 | 332 | 347 | 6870 | 6885 | CCCGCCTCGAAGATCT | 31 | 1628 |
| 1062118 | 495 | 510 | N/A | N/A | TTGAGAGCTGGTGCAT | 153 | 1629 |
| 1062150 | 675 | 690 | 8252 | 8267 | GCAGTGCCGGCTCCCT | 45 | 1630 |
| 1062182 | 819 | 834 | 8465 | 8480 | TGAGGAAGTCCTCTGG | 124 | 1631 |
| 1062214 | 1002 | 1017 | N/A | N/A | TGTCGGATGATGCCAC | 56 | 1632 |
| 1062246 | 1141 | 1156 | N/A | N/A | TCTGGGAATGTGCTGT | 43 | 1633 |
| 1062278 | 1369 | 1384 | 13779 | 13794 | TCCACCCGCACAAAGC | 76 | 1634 |
| 1062310 | 1513 | 1528 | 13923 | 13938 | AGTTTGGCCCCTGTTC | 23 | 1635 |
| 1062342 | 1793 | 1808 | 14203 | 14218 | TGTGCGAGCAGCTGAG | 36 | 1636 |
| 1062374 | 1910 | 1925 | 14320 | 14335 | TTGAGGTTGTTTGAGT | 51 | 1637 |
| 1062406 | 2081 | 2096 | 14491 | 14506 | GTGTTGGGACCTCAGA | 42 | 1638 |
| 1062438 | 2296 | 2311 | N/A | N/A | GTAGTTCCTCTGCAGT | 59 | 1639 |
| 1062470 | N/A | N/A | 8333 | 8348 | GGATAGGAGGGCGAGG | 31 | 1640 |
| 1062502 | N/A | N/A | 13649 | 13664 | CCTCCCCAATGTGCCT | 56 | 1641 |
| 1062534 | N/A | N/A | 664 | 679 | AGCTGGGTACATCCCA | 106 | 1642 |
| 1062566 | N/A | N/A | 747 | 762 | GCATTAAGTACTTCAC | 22 | 1643 |
| 1062598 | N/A | N/A | 1009 | 1024 | CAGATGGCGGGAGAAA | 165 | 1644 |
| 1062630 | N/A | N/A | 1188 | 1203 | CAAAGCTCTAGGCTGG | 87 | 1645 |
| 1062662 | N/A | N/A | 1299 | 1314 | GCCCCGGCACCTTGCA | 46 | 1646 |
| 1062695 | N/A | N/A | 1400 | 1415 | GCTAAACTACGGTTGA | 40 | 1647 |
| 1062727 | N/A | N/A | 1630 | 1645 | GCTTCAAAAACACTAC | 104 | 1648 |
| 1062759 | N/A | N/A | 1803 | 1818 | GCAACTCCCTTTTCAG | 54 | 1649 |
| 1062791 | N/A | N/A | 1919 | 1934 | ATAATACTCACCTAGG | 49 | 1650 |
| 1062823 | N/A | N/A | 2110 | 2125 | GTGGCAAATCAATAAG | 32 | 1651 |
| 1062855 | N/A | N/A | 2337 | 2352 | GGTGAACATTTATCTC | 62 | 1652 |
| 1062887 | N/A | N/A | 2462 | 2477 | AATCACACATAGGGCT | 145 | 1653 |
| 1062919 | N/A | N/A | 2655 | 2670 | CCAGATCCATTCAAGA | 47 | 1654 |
| 1062951 | N/A | N/A | 2805 | 2820 | AAACTGGAGGACCATG | 95 | 1655 |
| 1062983 | N/A | N/A | 3018 | 3033 | TTCAACTGATGCTGCC | 72 | 1656 |
| 1063015 | N/A | N/A | 3182 | 3197 | ATAGGGATACATAGAG | 86 | 1657 |
| 1063047 | N/A | N/A | 3316 | 3331 | CCTTCTACACTGAGCA | 40 | 1658 |
| 1063079 | N/A | N/A | 3584 | 3599 | GCCCAGCTCTTGTGAG | 117 | 1659 |
| 1063111 | N/A | N/A | 3755 | 3770 | TCGCCAATACAGAGCC | 90 | 1660 |
| 1063143 | N/A | N/A | 3991 | 4006 | CAAACTCCTTGGAACC | 58 | 1661 |
| 1063175 | N/A | N/A | 4181 | 4196 | AGCTCTGAGAGTGCCA | 125 | 1662 |
| 1063207 | N/A | N/A | 4370 | 4385 | GAGGGCAGATACCCCA | 29 | 1663 |
| 1063238 | N/A | N/A | 4455 | 4470 | GCCCCCGACTTGCCCA | 16 | 1664 |
| 1063270 | N/A | N/A | 4665 | 4680 | GCAAAGCATAGATACA | 35 | 1665 |
| 1063302 | N/A | N/A | 4807 | 4822 | AATACCGATTTCGGTG | 129 | 1666 |
| 1063334 | N/A | N/A | 5164 | 5179 | ATTAAGTTCTTAGTCT | 82 | 1667 |
| 1063366 | N/A | N/A | 5424 | 5439 | TGACTTGAGAACTCCA | 136 | 1668 |
| 1063398 | N/A | N/A | 5614 | 5629 | CTTGAAAGCCCTCCAC | 133 | 1669 |
| 1063430 | N/A | N/A | 5827 | 5842 | CACGGATCCAGCATGG | 135 | 1670 |
| 1063462 | N/A | N/A | 5939 | 5954 | GATAGACATGAAGAGT | 65 | 1671 |
| 1063494 | N/A | N/A | 6075 | 6090 | AGCTTGGATGTAGTGG | 88 | 1672 |
| 1063526 | N/A | N/A | 6203 | 6218 | GAGGAGGCTATTGTAA | 87 | 1673 |
| 1063558 | N/A | N/A | 6402 | 6417 | ATGAGGGCAATGGTTG | 42 | 1674 |
| 1063590 | N/A | N/A | 6637 | 6652 | TACTCGACCACCTGAG | 101 | 1675 |
| 1063622 | N/A | N/A | 7056 | 7071 | AGACTTGCCTGGGACC | 135 | 1676 |
| 1063654 | N/A | N/A | 7312 | 7327 | ATGGAGATCGAGTAAC | 13 | 1677 |
| 1063686 | N/A | N/A | 7560 | 7575 | TCCATACCTGGTGCAT | 73 | 1678 |
| 1063718 | N/A | N/A | 7906 | 7921 | CCTGACACCTTTGACC | 49 | 1679 |
| 1063750 | N/A | N/A | 8030 | 8045 | TTCGCAGGTGCTGACA | 64 | 1680 |
| 1063782 | N/A | N/A | 8212 | 8227 | GTTGATCCCTGTGGGT | 54 | 1681 |
| 1063813 | N/A | N/A | 8680 | 8695 | ATACATACGAGAAAAC | 59 | 1682 |
| 1063845 | N/A | N/A | 8892 | 8907 | AACTTTGGGAACAGTG | 71 | 1683 |
| 1063877 | N/A | N/A | 9251 | 9266 | TAACACATGCCCCTCA | 98 | 1684 |
| 1063909 | N/A | N/A | 9545 | 9560 | TTTTGCGCACTATCCC | 86 | 1685 |
| 1063941 | N/A | N/A | 9820 | 9835 | TCTGAGTCTGCCACCA | 35 | 1686 |
| 1063973 | N/A | N/A | 10374 | 10389 | ACATAGCTGGTCCTGC | 35 | 1687 |
| 1064005 | N/A | N/A | 10622 | 10637 | AATAGGGCTCTTTACC | 55 | 1688 |
| 1064037 | N/A | N/A | 11308 | 11323 | GACCATTCTTACCTGG | 58 | 1689 |
| 1064069 | N/A | N/A | 11466 | 11481 | CCGAAAGGAAGCTTTT | 95 | 1690 |
| 1064102 | N/A | N/A | 11592 | 11607 | CTTCTGATGGCCGAAT | 86 | 1691 |
| 1064135 | N/A | N/A | 11668 | 11683 | GGGCGAATCCACCCCG | 81 | 1692 |
| 1064167 | N/A | N/A | 11778 | 11793 | ACCAAAGGATGCAAGA | 136 | 1693 |
| 1064199 | N/A | N/A | 11868 | 11883 | CACCTGACATAAGTTG | 195 | 1694 |
| 1064231 | N/A | N/A | 11943 | 11958 | CTACAAGGTGAGTCTA | 56 | 1695 |
| 1064263 | N/A | N/A | 12093 | 12108 | GCTTACCCAGCGGATG | 165* | 1696 |
| 1064295 | N/A | N/A | 12331 | 12346 | TTAGGGTCAGAATTTG | 155 | 1697 |
| 1064327 | N/A | N/A | 12462 | 12477 | GGAAGGAGTTAGAGTA | 129 | 1698 |
| 1064359 | N/A | N/A | 12653 | 12668 | CGCTAGGATGAAGGTT | 126 | 1699 |
| 1064391 | N/A | N/A | 12864 | 12879 | TGAGGTTAGTTGTGGG | 22 | 1700 |
| 1064423 | N/A | N/A | 13020 | 13035 | GGTGGGTTAAGAGTCA | 141 | 1701 |
| 1064455 | N/A | N/A | 13330 | 13345 | ACAGGACTAGATGTGG | 65 | 1702 |

TABLE 27
Inhibition of Foxp3 mRNA by 3-10-3 cEt gapmers targeting SEQ ID NO.: 1, and 2

| Compound | SEQ ID NO: 1 | SEQ ID NO: 1 | SEQ ID NO: 2 | SEQ ID NO: 2 | Sequence | FOXP3 | SEQ |
|---|---|---|---|---|---|---|---|
| Number | Start Site | Stop Site | Start Site | Stop Site | (5′ to 3′) | (% UTC) | ID NO |
| 582998 | N/A | N/A | 8468 | 8483 | ACTTGAGGAAGTCCTC | 105 | 1703 |
| 910950 | 1434 | 1449 | 13844 | 13859 | GCCTCTGGCTCCGTTT | 90 | 94 |
| 911144 | N/A | N/A | 7355 | 7370 | TGCTATGATCATCCCC | 28 | 65 |
| 1062023 | 56 | 71 | 456 | 471 | CACGCTGTACGGTGTG | 104 | 1704 |
| 1062055 | 204 | 219 | 6742 | 6757 | CCGAGGGCTTGCCAGG | 94 | 1705 |
| 1062087 | 333 | 348 | 6871 | 6886 | CCCCGCCTCGAAGATC | 28 | 1706 |
| 1062119 | 496 | 511 | N/A | N/A | GTTGAGAGCTGGTGCA | 82 | 1707 |
| 1062151 | 680 | 695 | 8257 | 8272 | GCAGAGCAGTGCCGGC | 82 | 1708 |
| 1062183 | 820 | 835 | 8466 | 8481 | TTGAGGAAGTCCTCTG | 56 | 1709 |
| 1062215 | 1003 | 1018 | N/A | N/A | TTGTCGGATGATGCCA | 75 | 1710 |
| 1062247 | 1151 | 1166 | N/A | N/A | GTGGAGGAACTCTGGG | 26 | 1711 |
| 1062279 | 1370 | 1385 | 13780 | 13795 | CTCCACCCGCACAAAG | 54 | 1712 |
| 1062311 | 1514 | 1529 | 13924 | 13939 | CAGTTTGGCCCCTGTT | 59 | 1713 |
| 1062343 | 1794 | 1809 | 14204 | 14219 | CTGTGCGAGCAGCTGA | 57 | 1714 |
| 1062375 | 1913 | 1928 | 14323 | 14338 | GCTTTGAGGTTGTTTG | 22 | 1715 |
| 1062407 | 2082 | 2097 | 14492 | 14507 | CGTGTTGGGACCTCAG | 22 | 1716 |
| 1062439 | 2298 | 2313 | N/A | N/A | GAGTAGTTCCTCTGCA | 32 | 1717 |
| 1062471 | N/A | N/A | 8354 | 8369 | GACAGAGGGTGTCAGG | 114 | 1718 |
| 1062503 | N/A | N/A | 13650 | 13665 | TCCTCCCCAATGTGCC | 57 | 1719 |
| 1062535 | N/A | N/A | 666 | 681 | GTAGCTGGGTACATCC | 46 | 1720 |
| 1062567 | N/A | N/A | 753 | 768 | GCCCATGCATTAAGTA | 83 | 1721 |
| 1062599 | N/A | N/A | 1010 | 1025 | ACAGATGGCGGGAGAA | 123 | 1722 |
| 1062631 | N/A | N/A | 1189 | 1204 | ACAAAGCTCTAGGCTG | 92 | 1723 |
| 1062663 | N/A | N/A | 1312 | 1327 | AAGTGCTCAGCTTGCC | 70 | 1724 |
| 1062696 | N/A | N/A | 1401 | 1416 | AGCTAAACTACGGTTG | 76 | 1725 |
| 1062728 | N/A | N/A | 1683 | 1698 | GAGGACAGTCTTGTCC | 96 | 1726 |
| 1062760 | N/A | N/A | 1821 | 1836 | CACGCCCCCTTTGCCC | 27 | 1727 |
| 1062792 | N/A | N/A | 1920 | 1935 | AATAATACTCACCTAG | 111 | 1728 |
| 1062824 | N/A | N/A | 2113 | 2128 | GCTGTGGCAAATCAAT | 59 | 1729 |
| 1062856 | N/A | N/A | 2341 | 2356 | CATAGGTGAACATTTA | 47 | 1730 |
| 1062888 | N/A | N/A | 2478 | 2493 | TAAGTGCCTGGCTAAA | 70 | 1731 |
| 1062920 | N/A | N/A | 2656 | 2671 | CCCAGATCCATTCAAG | 48 | 1732 |
| 1062952 | N/A | N/A | 2806 | 2821 | CAAACTGGAGGACCAT | 113 | 1733 |
| 1062984 | N/A | N/A | 3019 | 3034 | GTTCAACTGATGCTGC | 41 | 1734 |
| 1063016 | N/A | N/A | 3183 | 3198 | GATAGGGATACATAGA | 92 | 1735 |
| 1063048 | N/A | N/A | 3317 | 3332 | CCCTTCTACACTGAGC | 48 | 1736 |
| 1063080 | N/A | N/A | 3591 | 3606 | TCACCTAGCCCAGCTC | 75 | 1737 |
| 1063112 | N/A | N/A | 3756 | 3771 | TTCGCCAATACAGAGC | 47 | 1738 |
| 1063144 | N/A | N/A | 3994 | 4009 | GTCCAAACTCCTTGGA | 104 | 1739 |
| 1063176 | N/A | N/A | 4189 | 4204 | AGGTTTGAAGCTCTGA | 33 | 1740 |
| 1063208 | N/A | N/A | 4371 | 4386 | AGAGGGCAGATACCCC | 83 | 1741 |
| 1063239 | N/A | N/A | 4456 | 4471 | AGCCCCCGACTTGCCC | 44 | 1742 |
| 1063271 | N/A | N/A | 4666 | 4681 | AGCAAAGCATAGATAC | 49 | 1743 |
| 1063303 | N/A | N/A | 4808 | 4823 | TAATACCGATTTCGGT | 110 | 1744 |
| 1063335 | N/A | N/A | 5165 | 5180 | TATTAAGTTCTTAGTC | 47 | 1745 |
| 1063367 | N/A | N/A | 5426 | 5441 | AGTGACTTGAGAACTC | 67 | 1746 |
| 1063399 | N/A | N/A | 5616 | 5631 | ACCTTGAAAGCCCTCC | 28 | 1747 |
| 1063431 | N/A | N/A | 5828 | 5843 | GCACGGATCCAGCATG | 85 | 1748 |
| 1063463 | N/A | N/A | 5942 | 5957 | GTAGATAGACATGAAG | 59 | 1749 |
| 1063495 | N/A | N/A | 6076 | 6091 | CAGCTTGGATGTAGTG | 55 | 1750 |
| 1063527 | N/A | N/A | 6235 | 6250 | AGATTCATCTGGCTGC | 46 | 1751 |
| 1063559 | N/A | N/A | 6403 | 6418 | TATGAGGGCAATGGTT | 77 | 1752 |
| 1063591 | N/A | N/A | 6638 | 6653 | ATACTCGACCACCTGA | 76 | 1753 |
| 1063623 | N/A | N/A | 7060 | 7075 | TCACAGACTTGCCTGG | 83 | 1754 |
| 1063655 | N/A | N/A | 7331 | 7346 | CGTATGGAAACTGAGG | 19 | 1755 |
| 1063687 | N/A | N/A | 7562 | 7577 | CGTCCATACCTGGTGC | 94 | 1756 |
| 1063719 | N/A | N/A | 7907 | 7922 | ACCTGACACCTTTGAC | 89 | 1757 |
| 1063751 | N/A | N/A | 8031 | 8046 | ATTCGCAGGTGCTGAC | 64 | 1758 |
| 1063814 | N/A | N/A | 8682 | 8697 | TTATACATACGAGAAA | 108 | 1759 |
| 1063846 | N/A | N/A | 8895 | 8910 | TAGAACTTTGGGAACA | 73 | 1760 |
| 1063878 | N/A | N/A | 9253 | 9268 | CTTAACACATGCCCCT | 82 | 1761 |
| 1063910 | N/A | N/A | 9551 | 9566 | AGAAGGTTTTGCGCAC | 20 | 1762 |
| 1063942 | N/A | N/A | 9866 | 9881 | GTTAGGTTCCCTGCAC | 68 | 1763 |
| 1063974 | N/A | N/A | 10375 | 10390 | TACATAGCTGGTCCTG | 34 | 1764 |
| 1064006 | N/A | N/A | 10623 | 10638 | GAATAGGGCTCTTTAC | 87 | 1765 |
| 1064038 | N/A | N/A | 11309 | 11324 | GGACCATTCTTACCTG | 104 | 1766 |
| 1064070 | N/A | N/A | 11467 | 11482 | CCCGAAAGGAAGCTTT | 65 | 1767 |
| 1064103 | N/A | N/A | 11594 | 11609 | CCCTTCTGATGGCCGA | 28 | 1768 |
| 1064136 | N/A | N/A | 11669 | 11684 | CGGGCGAATCCACCCC | 110 | 1769 |
| 1064168 | N/A | N/A | 11779 | 11794 | CACCAAAGGATGCAAG | 109 | 1770 |
| 1064200 | N/A | N/A | 11869 | 11884 | GCACCTGACATAAGTT | 77 | 1771 |
| 1064232 | N/A | N/A | 11944 | 11959 | CCTACAAGGTGAGTCT | 100 | 1772 |
| 1064264 | N/A | N/A | 12094 | 12109 | TGCTTACCCAGCGGAT | 107* | 1773 |
| 1064296 | N/A | N/A | 12333 | 12348 | GTTTAGGGTCAGAATT | 105 | 1774 |
| 1064328 | N/A | N/A | 12463 | 12478 | GGGAAGGAGTTAGAGT | 107 | 1775 |
| 1064360 | N/A | N/A | 12654 | 12669 | GCGCTAGGATGAAGGT | 102 | 1776 |
| 1064392 | N/A | N/A | 12866 | 12881 | GATGAGGTTAGTTGTG | 93 | 1777 |
| 1064424 | N/A | N/A | 13041 | 13056 | CAACTTAAGGGTCAGG | 86 | 1778 |
| 1064456 | N/A | N/A | 13331 | 13346 | GACAGGACTAGATGTG | 91 | 1779 |

TABLE 28
Inhibition of Foxp3 mRNA by 3-10-3 cEt gapmers targeting SEQ ID NO.: 1, and 2

| Compound | SEQ ID NO: 1 | SEQ ID NO: 1 | SEQ ID NO: 2 | SEQ ID NO: 2 | Sequence | FOXP3 | SEQ |
|---|---|---|---|---|---|---|---|
| Number | Start Site | Stop Site | Start Site | Stop Site | (5′ to 3′) | (% UTC) | ID NO |
| 910950 | 1434 | 1449 | 13844 | 13859 | GCCTCTGGCTCCGTTT | 90 | 94 |
| 911144 | N/A | N/A | 7355 | 7370 | TGCTATGATCATCCCC | 39 | 65 |
| 1062024 | 58 | 73 | 458 | 473 | ACCACGCTGTACGGTG | 92 | 1780 |
| 1062056 | 205 | 220 | 6743 | 6758 | GCCGAGGGCTTGCCAG | 103 | 1781 |
| 1062088 | 334 | 349 | 6872 | 6887 | GCCCCGCCTCGAAGAT | 56 | 1782 |
| 1062120 | 498 | 513 | N/A | N/A | CCGTTGAGAGCTGGTG | 68 | 1783 |
| 1062152 | 682 | 697 | 8259 | 8274 | GTGCAGAGCAGTGCCG | 78 | 1784 |
| 1062184 | 822 | 837 | N/A | N/A | GCTTGAGGAAGTCCTC | 79 | 1785 |
| 1062216 | 1004 | 1019 | 11160 | 11175 | CTTGTCGGATGATGCC | 49 | 1786 |
| 1062248 | 1157 | 1172 | 12027 | 12042 | CATGTTGTGGAGGAAC | 69 | 1787 |
| 1062280 | 1372 | 1387 | 13782 | 13797 | CTCTCCACCCGCACAA | 67 | 1788 |
| 1062312 | 1515 | 1530 | 13925 | 13940 | CCAGTTTGGCCCCTGT | 88 | 1789 |
| 1062344 | 1795 | 1810 | 14205 | 14220 | TCTGTGCGAGCAGCTG | 43 | 1790 |
| 1062376 | 1915 | 1930 | 14325 | 14340 | CAGCTTTGAGGTTGTT | 30 | 1791 |
| 1062408 | 2105 | 2120 | 14515 | 14530 | CAGGCCGTGTGTGTGA | 64 | 1792 |
| 1062440 | 2299 | 2314 | N/A | N/A | TGAGTAGTTCCTCTGC | 56 | 1793 |
| 1062472 | N/A | N/A | 13560 | 13575 | GAGGAGCTCACCTTCC | 106 | 1794 |
| 1062504 | N/A | N/A | 13655 | 13670 | CCCGTTCCTCCCCAAT | 34 | 1795 |
| 1062536 | N/A | N/A | 668 | 683 | CGGTAGCTGGGTACAT | 36 | 1796 |
| 1062568 | N/A | N/A | 755 | 770 | CTGCCCATGCATTAAG | 70 | 1797 |
| 1062600 | N/A | N/A | 1011 | 1026 | GACAGATGGCGGGAGA | 98 | 1798 |
| 1062632 | N/A | N/A | 1190 | 1205 | TACAAAGCTCTAGGCT | 82 | 1799 |
| 1062664 | N/A | N/A | 1314 | 1329 | TTAAGTGCTCAGCTTG | 77 | 1800 |
| 1062697 | N/A | N/A | 1402 | 1417 | CAGCTAAACTACGGTT | 86 | 1801 |
| 1062729 | N/A | N/A | 1684 | 1699 | TGAGGACAGTCTTGTC | 69 | 1802 |
| 1062761 | N/A | N/A | 1827 | 1842 | AAAATGCACGCCCCCT | 36 | 1803 |
| 1062793 | N/A | N/A | 1997 | 2012 | GTAATCACAAGATGCA | 56 | 1804 |
| 1062825 | N/A | N/A | 2120 | 2135 | ATAAAGAGCTGTGGCA | 81 | 1805 |
| 1062857 | N/A | N/A | 2345 | 2360 | CCAACATAGGTGAACA | 2 | 1806 |
| 1062889 | N/A | N/A | 2479 | 2494 | TTAAGTGCCTGGCTAA | 73 | 1807 |
| 1062921 | N/A | N/A | 2668 | 2683 | TACCCTAAAATGCCCA | 55 | 1808 |
| 1062953 | N/A | N/A | 2807 | 2822 | TCAAACTGGAGGACCA | 112 | 1809 |
| 1062985 | N/A | N/A | 3024 | 3039 | GGCTGGTTCAACTGAT | 50 | 1810 |
| 1063017 | N/A | N/A | 3184 | 3199 | AGATAGGGATACATAG | 89 | 1811 |
| 1063049 | N/A | N/A | 3318 | 3333 | GCCCTTCTACACTGAG | 32 | 1812 |
| 1063081 | N/A | N/A | 3592 | 3607 | CTCACCTAGCCCAGCT | 103 | 1813 |
| 1063113 | N/A | N/A | 3757 | 3772 | CTTCGCCAATACAGAG | 74 | 1814 |
| 1063145 | N/A | N/A | 4023 | 4038 | CTCAGTATGTGTAGGC | 35 | 1815 |
| 1063177 | N/A | N/A | 4190 | 4205 | CAGGTTTGAAGCTCTG | 73 | 1816 |
| 1063209 | N/A | N/A | 4372 | 4387 | AAGAGGGCAGATACCC | 81 | 1817 |
| 1063240 | N/A | N/A | 4457 | 4472 | CAGCCCCCGACTTGCC | 65 | 1818 |
| 1063272 | N/A | N/A | 4668 | 4683 | TCAGCAAAGCATAGAT | 77 | 1819 |
| 1063304 | N/A | N/A | 4809 | 4824 | CTAATACCGATTTCGG | 93 | 1820 |
| 1063336 | N/A | N/A | 5166 | 5181 | GTATTAAGTTCTTAGT | 71 | 1821 |
| 1063368 | N/A | N/A | 5428 | 5443 | ATAGTGACTTGAGAAC | 101 | 1822 |
| 1063400 | N/A | N/A | 5617 | 5632 | CACCTTGAAAGCCCTC | 35 | 1823 |
| 1063432 | N/A | N/A | 5829 | 5844 | TGCACGGATCCAGCAT | 123 | 1824 |
| 1063464 | N/A | N/A | 5943 | 5958 | TGTAGATAGACATGAA | 67 | 1825 |
| 1063496 | N/A | N/A | 6094 | 6109 | GATCAGGAGCAGTGCT | 93 | 1826 |
| 1063528 | N/A | N/A | 6251 | 6266 | TAGGCATGGACTCAAA | 78 | 1827 |
| 1063560 | N/A | N/A | 6404 | 6419 | CTATGAGGGCAATGGT | 82 | 1828 |
| 1063592 | N/A | N/A | 6639 | 6654 | GATACTCGACCACCTG | 66 | 1829 |
| 1063624 | N/A | N/A | 7066 | 7081 | CATAAGTCACAGACTT | 93 | 1830 |
| 1063656 | N/A | N/A | 7352 | 7367 | TATGATCATCCCCCTT | 73 | 1831 |
| 1063688 | N/A | N/A | 7563 | 7578 | CCGTCCATACCTGGTG | 89 | 1832 |
| 1063720 | N/A | N/A | 7908 | 7923 | GACCTGACACCTTTGA | 60 | 1833 |
| 1063752 | N/A | N/A | 8032 | 8047 | CATTCGCAGGTGCTGA | 70 | 1834 |
| 1063783 | N/A | N/A | 8469 | 8484 | CACTTGAGGAAGTCCT | 92 | 1835 |
| 1063815 | N/A | N/A | 8683 | 8698 | ATTATACATACGAGAA | 90 | 1836 |
| 1063847 | N/A | N/A | 8899 | 8914 | GAGCTAGAACTTTGGG | 80 | 1837 |
| 1063879 | N/A | N/A | 9254 | 9269 | CCTTAACACATGCCCC | 59 | 1838 |
| 1063911 | N/A | N/A | 9553 | 9568 | ACAGAAGGTTTTGCGC | 57 | 1839 |
| 1063943 | N/A | N/A | 9867 | 9882 | GGTTAGGTTCCCTGCA | 56 | 1840 |
| 1063975 | N/A | N/A | 10376 | 10391 | TTACATAGCTGGTCCT | 36 | 1841 |
| 1064007 | N/A | N/A | 10624 | 10639 | TGAATAGGGCTCTTTA | 84 | 1842 |
| 1064039 | N/A | N/A | 11311 | 11326 | AAGGACCATTCTTACC | 135 | 1843 |
| 1064071 | N/A | N/A | 11468 | 11483 | TCCCGAAAGGAAGCTT | 64 | 1844 |
| 1064105 | N/A | N/A | 11602 | 11617 | GGGTCCCTCCCTTCTG | 69 | 1845 |
| 1064137 | N/A | N/A | 11670 | 11685 | TCGGGCGAATCCACCC | 88 | 1846 |
| 1064169 | N/A | N/A | 11782 | 11797 | GCACACCAAAGGATGC | 110 | 1847 |
| 1064201 | N/A | N/A | 11870 | 11885 | AGCACCTGACATAAGT | 81 | 1848 |
| 1064233 | N/A | N/A | 11945 | 11960 | CCCTACAAGGTGAGTC | 79 | 1849 |
| 1064265 | N/A | N/A | 12095 | 12110 | CTGCTTACCCAGCGGA | 93* | 1850 |
| 1064297 | N/A | N/A | 12334 | 12349 | GGTTTAGGGTCAGAAT | 51 | 1851 |
| 1064329 | N/A | N/A | 12477 | 12492 | TGGCATAAAGGCTGGG | 48 | 1852 |
| 1064361 | N/A | N/A | 12682 | 12697 | GTGAGGTTCAGGTTTG | 54 | 1853 |
| 1064393 | N/A | N/A | 12867 | 12882 | GGATGAGGTTAGTTGT | 98 | 1854 |
| 1064425 | N/A | N/A | 13043 | 13058 | GCCAACTTAAGGGTCA | 68 | 1855 |
| 1064457 | N/A | N/A | 13332 | 13347 | GGACAGGACTAGATGT | 91 | 1856 |

TABLE 29
Inhibition of Foxp3 mRNA by 3-10-3 cEt gapmers targeting SEQ ID NO.: 1, and 2

| Compound | SEQ ID NO: 1 | SEQ ID NO: 1 | SEQ ID NO: 2 | SEQ ID NO: 2 | Sequence | FOXP3 | SEQ |
|---|---|---|---|---|---|---|---|
| Number | Start Site | Stop Site | Start Site | Stop Site | (5′ to 3′) | (% UTC) | ID NO |
| 910950 | 1434 | 1449 | 13844 | 13859 | GCCTCTGGCTCCGTTT | 143 | 94 |
| 911144 | N/A | N/A | 7355 | 7370 | TGCTATGATCATCCCC | 53 | 65 |
| 1062025 | 60 | 75 | 460 | 475 | AAACCACGCTGTACGG | 143 | 1857 |
| 1062057 | 206 | 221 | 6744 | 6759 | GGCCGAGGGCTTGCCA | 88 | 1858 |
| 1062089 | 337 | 352 | 6875 | 6890 | TGGGCCCCGCCTCGAA | 232 | 1859 |
| 1062121 | 499 | 514 | N/A | N/A | ACCGTTGAGAGCTGGT | 423 | 1860 |
| 1062153 | 693 | 708 | 8270 | 8285 | GATTTGGGAAGGTGCA | 138 | 1861 |
| 1062185 | 824 | 839 | N/A | N/A | GTGCTTGAGGAAGTCC | 305 | 1862 |
| 1062217 | 1006 | 1021 | 11162 | 11177 | CCCTTGTCGGATGATG | 97 | 1863 |
| 1062249 | 1159 | 1174 | 12029 | 12044 | TCCATGTTGTGGAGGA | 448* | 1864 |
| 1062281 | 1376 | 1391 | 13786 | 13801 | CTCGCTCTCCACCCGC | 69 | 1865 |
| 1062313 | 1516 | 1531 | 13926 | 13941 | ACCAGTTTGGCCCCTG | 127 | 1866 |
| 1062345 | 1796 | 1811 | 14206 | 14221 | ATCTGTGCGAGCAGCT | 69 | 1867 |
| 1062377 | 1917 | 1932 | 14327 | 14342 | TGCAGCTTTGAGGTTG | 52 | 1868 |
| 1062409 | 2107 | 2122 | 14517 | 14532 | AACAGGCCGTGTGTGT | 67 | 1869 |
| 1062441 | 2300 | 2315 | N/A | N/A | ATGAGTAGTTCCTCTG | 47 | 1870 |
| 1062473 | N/A | N/A | 13561 | 13576 | AGAGGAGCTCACCTTC | 139 | 1871 |
| 1062505 | N/A | N/A | 13656 | 13671 | TCCCGTTCCTCCCCAA | 110 | 1872 |
| 1062537 | N/A | N/A | 669 | 684 | ACGGTAGCTGGGTACA | 141 | 1873 |
| 1062569 | N/A | N/A | 785 | 800 | ATCAATTGATGAATTC | 64 | 1874 |
| 1062601 | N/A | N/A | 1012 | 1027 | AGACAGATGGCGGGAG | 71 | 1875 |
| 1062633 | N/A | N/A | 1191 | 1206 | GTACAAAGCTCTAGGC | 40 | 1876 |
| 1062665 | N/A | N/A | 1315 | 1330 | GTTAAGTGCTCAGCTT | 146 | 1877 |
| 1062698 | N/A | N/A | 1409 | 1424 | GTCCACACAGCTAAAC | 75 | 1878 |
| 1062730 | N/A | N/A | 1686 | 1701 | TGTGAGGACAGTCTTG | 520 | 1879 |
| 1062762 | N/A | N/A | 1829 | 1844 | TAAAAATGCACGCCCC | 70 | 1880 |
| 1062794 | N/A | N/A | 1998 | 2013 | AGTAATCACAAGATGC | 201 | 1881 |
| 1062826 | N/A | N/A | 2121 | 2136 | AATAAAGAGCTGTGGC | 144 | 1882 |
| 1062858 | N/A | N/A | 2346 | 2361 | GCCAACATAGGTGAAC | 147 | 1883 |
| 1062890 | N/A | N/A | 2480 | 2495 | GTTAAGTGCCTGGCTA | 59 | 1884 |
| 1062922 | N/A | N/A | 2670 | 2685 | TATACCCTAAAATGCC | 63 | 1885 |
| 1062954 | N/A | N/A | 2808 | 2823 | TTCAAACTGGAGGACC | 166 | 1886 |
| 1062986 | N/A | N/A | 3026 | 3041 | CTGGCTGGTTCAACTG | 65 | 1887 |
| 1063018 | N/A | N/A | 3185 | 3200 | GAGATAGGGATACATA | 149 | 1888 |
| 1063050 | N/A | N/A | 3323 | 3338 | AATTTGCCCTTCTACA | 98 | 1889 |
| 1063082 | N/A | N/A | 3610 | 3625 | ACCTATGGAGTCCGGG | 57 | 1890 |
| 1063114 | N/A | N/A | 3758 | 3773 | CCTTCGCCAATACAGA | 410 | 1891 |
| 1063146 | N/A | N/A | 4024 | 4039 | TCTCAGTATGTGTAGG | 57 | 1892 |
| 1063178 | N/A | N/A | 4191 | 4206 | CCAGGTTTGAAGCTCT | 33 | 1893 |
| 1063210 | N/A | N/A | 4373 | 4388 | GAAGAGGGCAGATACC | 239 | 1894 |
| 1063241 | N/A | N/A | 4460 | 4475 | TCACAGCCCCCGACTT | 317 | 1895 |
| 1063273 | N/A | N/A | 4674 | 4689 | CCTGACTCAGCAAAGC | 238 | 1896 |
| 1063305 | N/A | N/A | 4810 | 4825 | ACTAATACCGATTTCG | 97 | 1897 |
| 1063337 | N/A | N/A | 5169 | 5184 | CAGGTATTAAGTTCTT | 67 | 1898 |
| 1063369 | N/A | N/A | 5429 | 5444 | CATAGTGACTTGAGAA | 379 | 1899 |
| 1063401 | N/A | N/A | 5618 | 5633 | TCACCTTGAAAGCCCT | 67 | 1900 |
| 1063433 | N/A | N/A | 5830 | 5845 | ATGCACGGATCCAGCA | 76 | 1901 |
| 1063465 | N/A | N/A | 5956 | 5971 | GCAAAAGTGCAGGTGT | 127 | 1902 |
| 1063497 | N/A | N/A | 6097 | 6112 | CTGGATCAGGAGCAGT | 533 | 1903 |
| 1063529 | N/A | N/A | 6254 | 6269 | GACTAGGCATGGACTC | 62 | 1904 |
| 1063561 | N/A | N/A | 6405 | 6420 | TCTATGAGGGCAATGG | 283 | 1905 |
| 1063593 | N/A | N/A | 6640 | 6655 | AGATACTCGACCACCT | 243 | 1906 |
| 1063625 | N/A | N/A | 7067 | 7082 | GCATAAGTCACAGACT | 121 | 1907 |
| 1063657 | N/A | N/A | 7354 | 7369 | GCTATGATCATCCCCC | 90 | 1908 |
| 1063689 | N/A | N/A | 7565 | 7580 | CACCGTCCATACCTGG | 461 | 1909 |
| 1063721 | N/A | N/A | 7909 | 7924 | AGACCTGACACCTTTG | 41 | 1910 |
| 1063753 | N/A | N/A | 8033 | 8048 | CCATTCGCAGGTGCTG | 164 | 1911 |
| 1063784 | N/A | N/A | 8470 | 8485 | TCACTTGAGGAAGTCC | 117 | 1912 |
| 1063816 | N/A | N/A | 8685 | 8700 | TTATTATACATACGAG | 214 | 1913 |
| 1063848 | N/A | N/A | 8900 | 8915 | GGAGCTAGAACTTTGG | 208 | 1914 |
| 1063880 | N/A | N/A | 9361 | 9376 | GCTCAATGCTCTGAAT | 93 | 1915 |
| 1063912 | N/A | N/A | 9554 | 9569 | GACAGAAGGTTTTGCG | 28 | 1916 |
| 1063944 | N/A | N/A | 9869 | 9884 | GAGGTTAGGTTCCCTG | 63 | 1917 |
| 1063976 | N/A | N/A | 10377 | 10392 | GTTACATAGCTGGTCC | 28 | 1918 |
| 1064008 | N/A | N/A | 10626 | 10641 | GTTGAATAGGGCTCTT | 51 | 1919 |
| 1064040 | N/A | N/A | 11312 | 11327 | CAAGGACCATTCTTAC | 78 | 1920 |
| 1064072 | N/A | N/A | 11469 | 11484 | ATCCCGAAAGGAAGCT | 68 | 1921 |
| 1064106 | N/A | N/A | 11607 | 11622 | TAGCAGGGTCCCTCCC | 177 | 1922 |
| 1064138 | N/A | N/A | 11671 | 11686 | CTCGGGCGAATCCACC | 74 | 1923 |
| 1064170 | N/A | N/A | 11790 | 11805 | AGTAACTTGCACACCA | 81 | 1924 |
| 1064202 | N/A | N/A | 11871 | 11886 | GAGCACCTGACATAAG | 215 | 1925 |
| 1064234 | N/A | N/A | 11946 | 11961 | CCCCTACAAGGTGAGT | 70 | 1926 |
| 1064266 | N/A | N/A | 12096 | 12111 | CCTGCTTACCCAGCGG | 62* | 1927 |
| 1064298 | N/A | N/A | 12336 | 12351 | TAGGTTTAGGGTCAGA | 27 | 1928 |
| 1064330 | N/A | N/A | 12478 | 12493 | TTGGCATAAAGGCTGG | 55 | 1929 |
| 1064362 | N/A | N/A | 12683 | 12698 | GGTGAGGTTCAGGTTT | 82 | 1930 |
| 1064394 | N/A | N/A | 12868 | 12883 | AGGATGAGGTTAGTTG | 199 | 1931 |
| 1064426 | N/A | N/A | 13044 | 13059 | GGCCAACTTAAGGGTC | 98 | 1932 |
| 1064458 | N/A | N/A | 13334 | 13349 | AGGGACAGGACTAGAT | 109 | 1933 |

TABLE 30
Inhibition of Foxp3 mRNA by 3-10-3 cEt gapmers targeting SEQ ID NO.: 1, and 2

| Compound | SEQ ID NO: 1 | SEQ ID NO: 1 | SEQ ID NO: 2 | SEQ ID NO: 2 | Sequence | FOXP3 | SEQ |
|---|---|---|---|---|---|---|---|
| Number | Start Site | Stop Site | Start Site | Stop Site | (5′ to 3′) | (% UTC) | ID NO |
| 910950 | 1434 | 1449 | 13844 | 13859 | GCCTCTGGCTCCGTTT | 162 | 94 |
| 911144 | N/A | N/A | 7355 | 7370 | TGCTATGATCATCCCC | 55 | 65 |
| 1062026 | 61 | 76 | 461 | 476 | AAAACCACGCTGTACG | 70 | 1934 |
| 1062058 | 246 | 261 | 6784 | 6799 | TGGGCGAGGCTCCTGG | 70 | 1935 |
| 1062090 | 342 | 357 | 6880 | 6895 | AGGCATGGGCCCCGCC | 53 | 1936 |
| 1062122 | 501 | 516 | 7664 | 7679 | CCACCGTTGAGAGCTG | 140 | 1937 |
| 1062154 | 702 | 717 | 8279 | 8294 | GTGCACTGGGATTTGG | 82 | 1938 |
| 1062186 | 826 | 841 | N/A | N/A | CAGTGCTTGAGGAAGT | 51 | 1939 |
| 1062218 | 1007 | 1022 | 11163 | 11178 | GCCCTTGTCGGATGAT | 92 | 1940 |
| 1062250 | 1162 | 1177 | 12032 | 12047 | TAGTCCATGTTGTGGA | 49* | 1941 |
| 1062282 | 1377 | 1392 | 13787 | 13802 | TCTCGCTCTCCACCCG | 71 | 1942 |
| 1062314 | 1520 | 1535 | 13930 | 13945 | TCCCACCAGTTTGGCC | 104 | 1943 |
| 1062346 | 1797 | 1812 | 14207 | 14222 | AATCTGTGCGAGCAGC | 59 | 1944 |
| 1062378 | 1919 | 1934 | 14329 | 14344 | GATGCAGCTTTGAGGT | 19 | 1945 |
| 1062410 | 2115 | 2130 | 14525 | 14540 | TGAATTCTAACAGGCC | 40 | 1946 |
| 1062442 | 2318 | 2333 | N/A | N/A | GCCTTGGATCCCAAAT | 57 | 1947 |
| 1062474 | N/A | N/A | 13562 | 13577 | CAGAGGAGCTCACCTT | 131 | 1948 |
| 1062506 | N/A | N/A | 13658 | 13673 | CATCCCGTTCCTCCCC | 64 | 1949 |
| 1062538 | N/A | N/A | 670 | 685 | CACGGTAGCTGGGTAC | 108 | 1950 |
| 1062570 | N/A | N/A | 788 | 803 | CGTATCAATTGATGAA | 17 | 1951 |
| 1062602 | N/A | N/A | 1014 | 1029 | ACAGACAGATGGCGGG | 59 | 1952 |
| 1062634 | N/A | N/A | 1214 | 1229 | TACTATTATTAAACGC | 79 | 1953 |
| 1062666 | N/A | N/A | 1316 | 1331 | AGTTAAGTGCTCAGCT | 52 | 1954 |
| 1062699 | N/A | N/A | 1411 | 1426 | AGGTCCACACAGCTAA | 42 | 1955 |
| 1062731 | N/A | N/A | 1687 | 1702 | ATGTGAGGACAGTCTT | 117 | 1956 |
| 1062763 | N/A | N/A | 1830 | 1845 | TTAAAAATGCACGCCC | 95 | 1957 |
| 1062795 | N/A | N/A | 2014 | 2029 | GCCAATGAATAGTAAA | 110 | 1958 |
| 1062827 | N/A | N/A | 2125 | 2140 | TCCAAATAAAGAGCTG | 97 | 1959 |
| 1062859 | N/A | N/A | 2347 | 2362 | AGCCAACATAGGTGAA | 147 | 1960 |
| 1062891 | N/A | N/A | 2512 | 2527 | CAGTACATATGAGGAA | 19 | 1961 |
| 1062923 | N/A | N/A | 2672 | 2687 | CATATACCCTAAAATG | 220 | 1962 |
| 1062955 | N/A | N/A | 2809 | 2824 | TTTCAAACTGGAGGAC | 70 | 1963 |
| 1062987 | N/A | N/A | 3029 | 3044 | TCTCTGGCTGGTTCAA | 44 | 1964 |
| 1063019 | N/A | N/A | 3186 | 3201 | AGAGATAGGGATACAT | 134 | 1965 |
| 1063051 | N/A | N/A | 3324 | 3339 | CAATTTGCCCTTCTAC | 151 | 1966 |
| 1063083 | N/A | N/A | 3611 | 3626 | GACCTATGGAGTCCGG | 139 | 1967 |
| 1063115 | N/A | N/A | 3759 | 3774 | GCCTTCGCCAATACAG | 54 | 1968 |
| 1063147 | N/A | N/A | 4032 | 4047 | TCCCAAAGTCTCAGTA | 100 | 1969 |
| 1063179 | N/A | N/A | 4192 | 4207 | CCCAGGTTTGAAGCTC | 117 | 1970 |
| 1063211 | N/A | N/A | 4374 | 4389 | AGAAGAGGGCAGATAC | 157 | 1971 |
| 1063242 | N/A | N/A | 4462 | 4477 | TGTCACAGCCCCCGAC | 86 | 1972 |
| 1063274 | N/A | N/A | 4683 | 4698 | GTGGGATGGCCTGACT | 148 | 1973 |
| 1063306 | N/A | N/A | 4811 | 4826 | AACTAATACCGATTTC | 129 | 1974 |
| 1063338 | N/A | N/A | 5170 | 5185 | CCAGGTATTAAGTTCT | 49 | 1975 |
| 1063370 | N/A | N/A | 5430 | 5445 | CCATAGTGACTTGAGA | 213 | 1976 |
| 1063402 | N/A | N/A | 5619 | 5634 | CTCACCTTGAAAGCCC | 85 | 1977 |
| 1063434 | N/A | N/A | 5833 | 5848 | ATCATGCACGGATCCA | 154 | 1978 |
| 1063466 | N/A | N/A | 5957 | 5972 | TGCAAAAGTGCAGGTG | 55 | 1979 |
| 1063498 | N/A | N/A | 6104 | 6119 | TCTGAAGCTGGATCAG | 151 | 1980 |
| 1063530 | N/A | N/A | 6255 | 6270 | TGACTAGGCATGGACT | 173 | 1981 |
| 1063562 | N/A | N/A | 6407 | 6422 | CCTCTATGAGGGCAAT | 237 | 1982 |
| 1063594 | N/A | N/A | 6643 | 6658 | ATGAGATACTCGACCA | 60 | 1983 |
| 1063626 | N/A | N/A | 7069 | 7084 | CTGCATAAGTCACAGA | 83 | 1984 |
| 1063658 | N/A | N/A | 7356 | 7371 | ATGCTATGATCATCCC | 26 | 1985 |
| 1063690 | N/A | N/A | 7568 | 7583 | ATTCACCGTCCATACC | 68 | 1986 |
| 1063722 | N/A | N/A | 7910 | 7925 | GAGACCTGACACCTTT | 57 | 1987 |
| 1063754 | N/A | N/A | 8034 | 8049 | GCCATTCGCAGGTGCT | 55 | 1988 |
| 1063785 | N/A | N/A | 8471 | 8486 | CTCACTTGAGGAAGTC | 101 | 1989 |
| 1063817 | N/A | N/A | 8705 | 8720 | AATAACAGCACAAACG | 71 | 1990 |
| 1063849 | N/A | N/A | 8901 | 8916 | AGGAGCTAGAACTTTG | 133 | 1991 |
| 1063881 | N/A | N/A | 9380 | 9395 | CCACGACAGGCCTGGT | 72 | 1992 |
| 1063913 | N/A | N/A | 9557 | 9572 | GTGGACAGAAGGTTTT | 44 | 1993 |
| 1063945 | N/A | N/A | 9870 | 9885 | TGAGGTTAGGTTCCCT | 73 | 1994 |
| 1063977 | N/A | N/A | 10381 | 10396 | GCAGGTTACATAGCTG | 57 | 1995 |
| 1064009 | N/A | N/A | 10662 | 10677 | CGTATGTGGCCACTGA | 56 | 1996 |
| 1064041 | N/A | N/A | 11313 | 11328 | GCAAGGACCATTCTTA | 86 | 1997 |
| 1064073 | N/A | N/A | 11476 | 11491 | CACGGACATCCCGAAA | 74 | 1998 |
| 1064107 | N/A | N/A | 11608 | 11623 | TTAGCAGGGTCCCTCC | 59 | 1999 |
| 1064139 | N/A | N/A | 11672 | 11687 | GCTCGGGCGAATCCAC | 117 | 2000 |
| 1064171 | N/A | N/A | 11792 | 11807 | GGAGTAACTTGCACAC | 89 | 2001 |
| 1064203 | N/A | N/A | 11883 | 11898 | GTACTGTTTGCTGAGC | 31 | 2002 |
| 1064235 | N/A | N/A | 11966 | 11981 | AGCTAGCTCCCTGTCC | 50 | 2003 |
| 1064267 | N/A | N/A | 12097 | 12112 | CCCTGCTTACCCAGCG | 71* | 2004 |
| 1064299 | N/A | N/A | 12358 | 12373 | GAGGTGGACATCTGGA | 52 | 2005 |
| 1064331 | N/A | N/A | 12483 | 12498 | TTGGGTTGGCATAAAG | 69 | 2006 |
| 1064363 | N/A | N/A | 12698 | 12713 | CTGGTATCATGTAGGG | 53 | 2007 |
| 1064395 | N/A | N/A | 12869 | 12884 | AAGGATGAGGTTAGTT | 74 | 2008 |
| 1064427 | N/A | N/A | 13045 | 13060 | AGGCCAACTTAAGGGT | 74 | 2009 |
| 1064459 | N/A | N/A | 13337 | 13352 | ATCAGGGACAGGACTA | 177 | 2010 |

TABLE 31
Inhibition of Foxp3 mRNA by 3-10-3 cEt gapmers targeting SEQ ID NO.: 1, and 2

| Compound | SEQ ID NO: 1 | SEQ ID NO: 1 | SEQ ID NO: 2 | SEQ ID NO: 2 | Sequence | FOXP3 | SEQ |
|---|---|---|---|---|---|---|---|
| Number | Start Site | Stop Site | Start Site | Stop Site | (5′ to 3′) | (% UTC) | ID NO |
| 911144 | N/A | N/A | 7355 | 7370 | TGCTATGATCATCCCC | 34 | 65 |
| 911179 | N/A | N/A | 10316 | 10331 | GCTTTAACAACTCAGG | 16 | 306 |
| 1062027 | 70 | 85 | 470 | 485 | CCGAGAAGAAAAACCA | 69 | 2011 |
| 1062059 | 247 | 262 | 6785 | 6800 | CTGGGCGAGGCTCCTG | 129 | 2012 |
| 1062091 | 343 | 358 | 6881 | 6896 | GAGGCATGGGCCCCGC | 104 | 2013 |
| 1062123 | 502 | 517 | 7665 | 7680 | TCCACCGTTGAGAGCT | 85 | 2014 |
| 1062155 | 710 | 725 | 8287 | 8302 | CTTCCTGGGTGCACTG | 101 | 2015 |
| 1062187 | 833 | 848 | N/A | N/A | CGCCTGGCAGTGCTTG | 112 | 2016 |
| 1062219 | 1009 | 1024 | 11165 | 11180 | GAGCCCTTGTCGGATG | 129 | 2017 |
| 1062251 | 1164 | 1179 | 12034 | 12049 | AGTAGTCCATGTTGTG | 45* | 2018 |
| 1062283 | 1379 | 1394 | 13789 | 13804 | CTTCTCGCTCTCCACC | 104 | 2019 |
| 1062315 | 1523 | 1538 | 13933 | 13948 | GCCTCCCACCAGTTTG | 61 | 2020 |
| 1062347 | 1798 | 1813 | 14208 | 14223 | TAATCTGTGCGAGCAG | 37 | 2021 |
| 1062379 | 1920 | 1935 | 14330 | 14345 | TGATGCAGCTTTGAGG | 32 | 2022 |
| 1062411 | 2128 | 2143 | 14538 | 14553 | TGAGATACACAGGTGA | 63 | 2023 |
| 1062443 | 2319 | 2334 | N/A | N/A | GGCCTTGGATCCCAAA | 121 | 2024 |
| 1062475 | N/A | N/A | 13563 | 13578 | TCAGAGGAGCTCACCT | 138 | 2025 |
| 1062507 | N/A | N/A | 13659 | 13674 | ACATCCCGTTCCTCCC | 77 | 2026 |
| 1062539 | N/A | N/A | 671 | 686 | TCACGGTAGCTGGGTA | 79 | 2027 |
| 1062571 | N/A | N/A | 802 | 817 | ATCCTATCCATCTACG | 110 | 2028 |
| 1062603 | N/A | N/A | 1023 | 1038 | AGTGTAGCGACAGACA | 129 | 2029 |
| 1062635 | N/A | N/A | 1215 | 1230 | TTACTATTATTAAACG | 128 | 2030 |
| 1062667 | N/A | N/A | 1317 | 1332 | CAGTTAAGTGCTCAGC | 39 | 2031 |
| 1062700 | N/A | N/A | 1415 | 1430 | GGGTAGGTCCACACAG | 40 | 2032 |
| 1062732 | N/A | N/A | 1688 | 1703 | GATGTGAGGACAGTCT | 116 | 2033 |
| 1062764 | N/A | N/A | 1831 | 1846 | TTTAAAAATGCACGCC | 73 | 2034 |
| 1062796 | N/A | N/A | 2015 | 2030 | GGCCAATGAATAGTAA | 101 | 2035 |
| 1062828 | N/A | N/A | 2138 | 2153 | GGTTAATAACCATTCC | 90 | 2036 |
| 1062860 | N/A | N/A | 2348 | 2363 | AAGCCAACATAGGTGA | 64 | 2037 |
| 1062892 | N/A | N/A | 2523 | 2538 | TATAACCATTGCAGTA | 58 | 2038 |
| 1062924 | N/A | N/A | 2678 | 2693 | CATCATCATATACCCT | 113 | 2039 |
| 1062956 | N/A | N/A | 2813 | 2828 | GGCATTTCAAACTGGA | 97 | 2040 |
| 1062988 | N/A | N/A | 3040 | 3055 | ACATTTGCTGGTCTCT | 45 | 2041 |
| 1063020 | N/A | N/A | 3189 | 3204 | CTGAGAGATAGGGATA | 79 | 2042 |
| 1063052 | N/A | N/A | 3342 | 3357 | CCTGAGATCTCTGGTC | 63 | 2043 |
| 1063084 | N/A | N/A | 3614 | 3629 | CCTGACCTATGGAGTC | 100 | 2044 |
| 1063116 | N/A | N/A | 3845 | 3860 | CGCCAGAGATGGCAAC | 103 | 2045 |
| 1063148 | N/A | N/A | 4039 | 4054 | TCTACGGTCCCAAAGT | 65 | 2046 |
| 1063180 | N/A | N/A | 4193 | 4208 | ACCCAGGTTTGAAGCT | 55 | 2047 |
| 1063212 | N/A | N/A | 4387 | 4402 | ACCACGGAGGAAGAGA | 94 | 2048 |
| 1063243 | N/A | N/A | 4467 | 4482 | CCTGTTGTCACAGCCC | 64 | 2049 |
| 1063275 | N/A | N/A | 4685 | 4700 | ATGTGGGATGGCCTGA | 123 | 2050 |
| 1063307 | N/A | N/A | 4813 | 4828 | CAAACTAATACCGATT | 96 | 2051 |
| 1063339 | N/A | N/A | 5171 | 5186 | TCCAGGTATTAAGTTC | 56 | 2052 |
| 1063371 | N/A | N/A | 5431 | 5446 | CCCATAGTGACTTGAG | 83 | 2053 |
| 1063403 | N/A | N/A | 5626 | 5641 | TATTGTCCTCACCTTG | 77 | 2054 |
| 1063435 | N/A | N/A | 5834 | 5849 | GATCATGCACGGATCC | 73 | 2055 |
| 1063467 | N/A | N/A | 5958 | 5973 | GTGCAAAAGTGCAGGT | 117 | 2056 |
| 1063499 | N/A | N/A | 6105 | 6120 | ATCTGAAGCTGGATCA | 99 | 2057 |
| 1063531 | N/A | N/A | 6257 | 6272 | AGTGACTAGGCATGGA | 47 | 2058 |
| 1063563 | N/A | N/A | 6408 | 6423 | TCCTCTATGAGGGCAA | 120 | 2059 |
| 1063595 | N/A | N/A | 6644 | 6659 | TATGAGATACTCGACC | 129 | 2060 |
| 1063627 | N/A | N/A | 7075 | 7090 | CAACATCTGCATAAGT | 93 | 2061 |
| 1063659 | N/A | N/A | 7357 | 7372 | GATGCTATGATCATCC | 114 | 2062 |
| 1063691 | N/A | N/A | 7570 | 7585 | CCATTCACCGTCCATA | 110 | 2063 |
| 1063723 | N/A | N/A | 7911 | 7926 | TGAGACCTGACACCTT | 78 | 2064 |
| 1063755 | N/A | N/A | 8035 | 8050 | GGCCATTCGCAGGTGC | 98 | 2065 |
| 1063786 | N/A | N/A | 8472 | 8487 | ACTCACTTGAGGAAGT | 152 | 2066 |
| 1063818 | N/A | N/A | 8760 | 8775 | GATCAAGACACTTAAC | 30 | 2067 |
| 1063850 | N/A | N/A | 8902 | 8917 | GAGGAGCTAGAACTTT | 88 | 2068 |
| 1063882 | N/A | N/A | 9381 | 9396 | ACCACGACAGGCCTGG | 87 | 2069 |
| 1063914 | N/A | N/A | 9560 | 9575 | ATGGTGGACAGAAGGT | 47 | 2070 |
| 1063946 | N/A | N/A | 9871 | 9886 | GTGAGGTTAGGTTCCC | 14 | 2071 |
| 1063978 | N/A | N/A | 10383 | 10398 | CTGCAGGTTACATAGC | 116 | 2072 |
| 1064010 | N/A | N/A | 10683 | 10698 | TTAGAGCACAGGTGCG | 115 | 2073 |
| 1064042 | N/A | N/A | 11314 | 11329 | TGCAAGGACCATTCTT | 110 | 2074 |
| 1064074 | N/A | N/A | 11478 | 11493 | GCCACGGACATCCCGA | 98 | 2075 |
| 1064108 | N/A | N/A | 11609 | 11624 | CTTAGCAGGGTCCCTC | 45 | 2076 |
| 1064140 | N/A | N/A | 11673 | 11688 | AGCTCGGGCGAATCCA | 102 | 2077 |
| 1064172 | N/A | N/A | 11793 | 11808 | CGGAGTAACTTGCACA | 52 | 2078 |
| 1064204 | N/A | N/A | 11887 | 11902 | ACAGGTACTGTTTGCT | 50 | 2079 |
| 1064236 | N/A | N/A | 11967 | 11982 | TAGCTAGCTCCCTGTC | 100 | 2080 |
| 1064268 | N/A | N/A | 12153 | 12168 | TTGGGAGGCAGGTCCC | 85 | 2081 |
| 1064300 | N/A | N/A | 12359 | 12374 | TGAGGTGGACATCTGG | 47 | 2082 |
| 1064332 | N/A | N/A | 12484 | 12499 | GTTGGGTTGGCATAAA | 78 | 2083 |
| 1064364 | N/A | N/A | 12699 | 12714 | TCTGGTATCATGTAGG | 70 | 2084 |
| 1064396 | N/A | N/A | 12870 | 12885 | CAAGGATGAGGTTAGT | 148 | 2085 |
| 1064428 | N/A | N/A | 13113 | 13128 | GACATTTCAGGGTTGG | 71 | 2086 |
| 1064460 | N/A | N/A | 13338 | 13353 | AATCAGGGACAGGACT | 123 | 2087 |

TABLE 32
Inhibition of Foxp3 mRNA by 3-10-3 cEt gapmers targeting SEQ ID NO.: 1, and 2

| Compound | SEQ ID NO: 1 | SEQ ID NO: 1 | SEQ ID NO: 2 | SEQ ID NO: 2 | Sequence | FOXP3 | SEQ |
|---|---|---|---|---|---|---|---|
| Number | Start Site | Stop Site | Start Site | Stop Site | (5′ to 3′) | (% UTC) | ID NO |
| 911144 | N/A | N/A | 7355 | 7370 | TGCTATGATCATCCCC | 53 | 65 |
| 911179 | N/A | N/A | 10316 | 10331 | GCTTTAACAACTCAGG | 16 | 306 |
| 1062028 | 81 | 96 | 481 | 496 | TTGCTTTTATACCGAG | 8 | 2088 |
| 1062060 | 248 | 263 | 6786 | 6801 | GCTGGGCGAGGCTCCT | 53 | 2089 |
| 1062092 | 346 | 361 | 6884 | 6899 | GAGGAGGCATGGGCCC | 74 | 2090 |
| 1062124 | 503 | 518 | 7666 | 7681 | ATCCACCGTTGAGAGC | 118 | 2091 |
| 1062156 | 723 | 738 | N/A | N/A | AAAGGGTGCTGTCCTT | 77 | 2092 |
| 1062188 | 835 | 850 | N/A | N/A | TCCGCCTGGCAGTGCT | 83 | 2093 |
| 1062220 | 1012 | 1027 | 11168 | 11183 | CAGGAGCCCTTGTCGG | 109 | 2094 |
| 1062252 | 1165 | 1180 | 12035 | 12050 | AAGTAGTCCATGTTGT | 44* | 2095 |
| 1062284 | 1386 | 1401 | 13796 | 13811 | CAGCCCCCTTCTCGCT | 126 | 2096 |
| 1062316 | 1551 | 1566 | 13961 | 13976 | GCCTATCATCCCTGCC | 153 | 2097 |
| 1062348 | 1801 | 1816 | 14211 | 14226 | AAGTAATCTGTGCGAG | 36 | 2098 |
| 1062380 | 1921 | 1936 | 14331 | 14346 | ATGATGCAGCTTTGAG | 43 | 2099 |
| 1062412 | 2129 | 2144 | 14539 | 14554 | GTGAGATACACAGGTG | 45 | 2100 |
| 1062444 | 2337 | 2352 | N/A | N/A | ACGGTACTGTGGGTTG | 36 | 2101 |
| 1062476 | N/A | N/A | 13569 | 13584 | GCCACCTCAGAGGAGC | 141 | 2102 |
| 1062508 | N/A | N/A | 13665 | 13680 | CAACCCACATCCCGTT | 74 | 2103 |
| 1062540 | N/A | N/A | 672 | 687 | ATCACGGTAGCTGGGT | 95 | 2104 |
| 1062572 | N/A | N/A | 803 | 818 | AATCCTATCCATCTAC | 161 | 2105 |
| 1062604 | N/A | N/A | 1033 | 1048 | AGAGAGTCTGAGTGTA | 121 | 2106 |
| 1062636 | N/A | N/A | 1220 | 1235 | CGACATTACTATTATT | 78 | 2107 |
| 1062668 | N/A | N/A | 1318 | 1333 | TCAGTTAAGTGCTCAG | 25 | 2108 |
| 1062701 | N/A | N/A | 1442 | 1457 | GACTCTGGTCACACAC | 88 | 2109 |
| 1062733 | N/A | N/A | 1701 | 1716 | CAAAGTTCATGCTGAT | 58 | 2110 |
| 1062765 | N/A | N/A | 1842 | 1857 | GGGTCATAAACTTTAA | 43 | 2111 |
| 1062797 | N/A | N/A | 2025 | 2040 | AAGCATGAATGGCCAA | 34 | 2112 |
| 1062829 | N/A | N/A | 2139 | 2154 | AGGTTAATAACCATTC | 40 | 2113 |
| 1062861 | N/A | N/A | 2350 | 2365 | AGAAGCCAACATAGGT | 28 | 2114 |
| 1062893 | N/A | N/A | 2524 | 2539 | TTATAACCATTGCAGT | 54 | 2115 |
| 1062925 | N/A | N/A | 2694 | 2709 | CAGTTTGAAATGTCAC | 128 | 2116 |
| 1062957 | N/A | N/A | 2815 | 2830 | GTGGCATTTCAAACTG | 116 | 2117 |
| 1062989 | N/A | N/A | 3041 | 3056 | AACATTTGCTGGTCTC | 23 | 2118 |
| 1063021 | N/A | N/A | 3193 | 3208 | CTGGCTGAGAGATAGG | 52 | 2119 |
| 1063053 | N/A | N/A | 3355 | 3370 | ATTTCGGTGAGGCCCT | 49 | 2120 |
| 1063085 | N/A | N/A | 3624 | 3639 | AACTAGGCCTCCTGAC | 64 | 2121 |
| 1063117 | N/A | N/A | 3847 | 3862 | TCCGCCAGAGATGGCA | 115 | 2122 |
| 1063149 | N/A | N/A | 4068 | 4083 | CTAGAATCTCAAAACC | 133 | 2123 |
| 1063181 | N/A | N/A | 4196 | 4211 | AGGACCCAGGTTTGAA | 105 | 2124 |
| 1063213 | N/A | N/A | 4388 | 4403 | CACCACGGAGGAAGAG | 139 | 2125 |
| 1063244 | N/A | N/A | 4469 | 4484 | GCCCTGTTGTCACAGC | 63 | 2126 |
| 1063276 | N/A | N/A | 4686 | 4701 | CATGTGGGATGGCCTG | 73 | 2127 |
| 1063308 | N/A | N/A | 4814 | 4829 | ACAAACTAATACCGAT | 106 | 2128 |
| 1063340 | N/A | N/A | 5174 | 5189 | GAATCCAGGTATTAAG | 72 | 2129 |
| 1063372 | N/A | N/A | 5432 | 5447 | TCCCATAGTGACTTGA | 53 | 2130 |
| 1063404 | N/A | N/A | 5627 | 5642 | CTATTGTCCTCACCTT | 42 | 2131 |
| 1063436 | N/A | N/A | 5837 | 5852 | TGTGATCATGCACGGA | 35 | 2132 |
| 1063468 | N/A | N/A | 5999 | 6014 | ACATTACCTGAGATGG | 130 | 2133 |
| 1063500 | N/A | N/A | 6107 | 6122 | TAATCTGAAGCTGGAT | 168 | 2134 |
| 1063532 | N/A | N/A | 6261 | 6276 | CCCCAGTGACTAGGCA | 78 | 2135 |
| 1063564 | N/A | N/A | 6413 | 6428 | ATGTGTCCTCTATGAG | 129 | 2136 |
| 1063596 | N/A | N/A | 6649 | 6664 | GGCGGTATGAGATACT | 97 | 2137 |
| 1063628 | N/A | N/A | 7081 | 7096 | GCCCTGCAACATCTGC | 70 | 2138 |
| 1063660 | N/A | N/A | 7360 | 7375 | GTAGATGCTATGATCA | 36 | 2139 |
| 1063692 | N/A | N/A | 7571 | 7586 | CCCATTCACCGTCCAT | 36 | 2140 |
| 1063724 | N/A | N/A | 7912 | 7927 | CTGAGACCTGACACCT | 71 | 2141 |
| 1063756 | N/A | N/A | 8036 | 8051 | CGGCCATTCGCAGGTG | 71 | 2142 |
| 1063787 | N/A | N/A | 8474 | 8489 | CCACTCACTTGAGGAA | 90 | 2143 |
| 1063819 | N/A | N/A | 8765 | 8780 | ATTTTGATCAAGACAC | 52 | 2144 |
| 1063851 | N/A | N/A | 8904 | 8919 | TAGAGGAGCTAGAACT | 90 | 2145 |
| 1063883 | N/A | N/A | 9396 | 9411 | GATTCCATGCAGGTGA | 135 | 2146 |
| 1063915 | N/A | N/A | 9564 | 9579 | GCACATGGTGGACAGA | 20 | 2147 |
| 1063947 | N/A | N/A | 9872 | 9887 | TGTGAGGTTAGGTTCC | 10 | 2148 |
| 1063979 | N/A | N/A | 10411 | 10426 | CGCCATCTTGAAATCT | 45 | 2149 |
| 1064011 | N/A | N/A | 10684 | 10699 | ATTAGAGCACAGGTGC | 82 | 2150 |
| 1064043 | N/A | N/A | 11315 | 11330 | GTGCAAGGACCATTCT | 130 | 2151 |
| 1064075 | N/A | N/A | 11505 | 11520 | ACTCGAGACCATATGG | 111 | 2152 |
| 1064109 | N/A | N/A | 11610 | 11625 | ACTTAGCAGGGTCCCT | 108 | 2153 |
| 1064141 | N/A | N/A | 11674 | 11689 | GAGCTCGGGCGAATCC | 109 | 2154 |
| 1064173 | N/A | N/A | 11794 | 11809 | GCGGAGTAACTTGCAC | 49 | 2155 |
| 1064205 | N/A | N/A | 11888 | 11903 | CACAGGTACTGTTTGC | 51 | 2156 |
| 1064237 | N/A | N/A | 11968 | 11983 | CTAGCTAGCTCCCTGT | 134 | 2157 |
| 1064269 | N/A | N/A | 12190 | 12205 | GAACCCACTCTGAGGG | 134 | 2158 |
| 1064301 | N/A | N/A | 12360 | 12375 | CTGAGGTGGACATCTG | 47 | 2159 |
| 1064333 | N/A | N/A | 12529 | 12544 | TGTATTGACATACTGG | 133 | 2160 |
| 1064365 | N/A | N/A | 12704 | 12719 | GAATATCTGGTATCAT | 141 | 2161 |
| 1064397 | N/A | N/A | 12871 | 12886 | GCAAGGATGAGGTTAG | 107 | 2162 |
| 1064429 | N/A | N/A | 13152 | 13167 | GTCTGGGATGGAGTTG | 64 | 2163 |
| 1064461 | N/A | N/A | 13339 | 13354 | TAATCAGGGACAGGAC | 68 | 2164 |

TABLE 33
Inhibition of Foxp3 mRNA by 3-10-3 cEt gapmers targeting SEQ ID NO.: 1, and 2

| Compound | SEQ ID NO: 1 | SEQ ID NO: 1 | SEQ ID NO: 2 | SEQ ID NO: 2 | Sequence | FOXP3 | SEQ |
|---|---|---|---|---|---|---|---|
| Number | Start Site | Stop Site | Start Site | Stop Site | (5′ to 3′) | (% UTC) | ID NO |
| 911144 | N/A | N/A | 7355 | 7370 | TGCTATGATCATCCCC | 35 | 65 |
| 911179 | N/A | N/A | 10316 | 10331 | GCTTTAACAACTCAGG | 23 | 306 |
| 1062029 | 82 | 97 | 482 | 497 | TTTGCTTTTATACCGA | 7 | 2165 |
| 1062061 | 249 | 264 | 6787 | 6802 | AGCTGGGCGAGGCTCC | 185 | 2166 |
| 1062093 | 347 | 362 | 6885 | 6900 | AGAGGAGGCATGGGCC | 36 | 2167 |
| 1062125 | 505 | 520 | 7668 | 7683 | GCATCCACCGTTGAGA | 29 | 2168 |
| 1062157 | 724 | 739 | N/A | N/A | GAAAGGGTGCTGTCCT | 266 | 2169 |
| 1062189 | 842 | 857 | 9432 | 9447 | AAGATGGTCCGCCTGG | 76 | 2170 |
| 1062221 | 1014 | 1029 | 11170 | 11185 | AGCAGGAGCCCTTGTC | 188 | 2171 |
| 1062253 | 1166 | 1181 | 12036 | 12051 | GAAGTAGTCCATGTTG | 76* | 2172 |
| 1062285 | 1395 | 1410 | 13805 | 13820 | CGGTCCACACAGCCCC | 99 | 2173 |
| 1062317 | 1553 | 1568 | 13963 | 13978 | GGGCCTATCATCCCTG | 103 | 2174 |
| 1062349 | 1803 | 1818 | 14213 | 14228 | TGAAGTAATCTGTGCG | 29 | 2175 |
| 1062381 | 1923 | 1938 | 14333 | 14348 | TGATGATGCAGCTTTG | 56 | 2176 |
| 1062413 | 2130 | 2145 | 14540 | 14555 | CGTGAGATACACAGGT | 11 | 2177 |
| 1062445 | 2338 | 2353 | N/A | N/A | GACGGTACTGTGGGTT | 94 | 2178 |
| 1062477 | N/A | N/A | 13572 | 13587 | ACCGCCACCTCAGAGG | 81 | 2179 |
| 1062509 | N/A | N/A | 13666 | 13681 | ACAACCCACATCCCGT | 43 | 2180 |
| 1062541 | N/A | N/A | 673 | 688 | AATCACGGTAGCTGGG | 72 | 2181 |
| 1062573 | N/A | N/A | 825 | 840 | CTGGCAGCTGACATAT | 148 | 2182 |
| 1062605 | N/A | N/A | 1034 | 1049 | AAGAGAGTCTGAGTGT | 43 | 2183 |
| 1062637 | N/A | N/A | 1223 | 1238 | CGGCGACATTACTATT | 87 | 2184 |
| 1062669 | N/A | N/A | 1319 | 1334 | TTCAGTTAAGTGCTCA | 9 | 2185 |
| 1062702 | N/A | N/A | 1445 | 1460 | ATGGACTCTGGTCACA | 74 | 2186 |
| 1062734 | N/A | N/A | 1702 | 1717 | TCAAAGTTCATGCTGA | 42 | 2187 |
| 1062766 | N/A | N/A | 1845 | 1860 | AGAGGGTCATAAACTT | 71 | 2188 |
| 1062798 | N/A | N/A | 2055 | 2070 | GACCAGACAACCAAAA | 212 | 2189 |
| 1062830 | N/A | N/A | 2143 | 2158 | TGAAAGGTTAATAACC | 36 | 2190 |
| 1062862 | N/A | N/A | 2351 | 2366 | TAGAAGCCAACATAGG | 34 | 2191 |
| 1062894 | N/A | N/A | 2525 | 2540 | ATTATAACCATTGCAG | 15 | 2192 |
| 1062926 | N/A | N/A | 2696 | 2711 | CCCAGTTTGAAATGTC | 110 | 2193 |
| 1062958 | N/A | N/A | 2826 | 2841 | TTGTGATGAATGTGGC | 159 | 2194 |
| 1062990 | N/A | N/A | 3042 | 3057 | GAACATTTGCTGGTCT | 62 | 2195 |
| 1063022 | N/A | N/A | 3196 | 3211 | GGACTGGCTGAGAGAT | 113 | 2196 |
| 1063054 | N/A | N/A | 3356 | 3371 | CATTTCGGTGAGGCCC | 18 | 2197 |
| 1063086 | N/A | N/A | 3625 | 3640 | CAACTAGGCCTCCTGA | 110 | 2198 |
| 1063118 | N/A | N/A | 3848 | 3863 | CTCCGCCAGAGATGGC | 153 | 2199 |
| 1063150 | N/A | N/A | 4072 | 4087 | GATCCTAGAATCTCAA | 38 | 2200 |
| 1063182 | N/A | N/A | 4197 | 4212 | GAGGACCCAGGTTTGA | 78 | 2201 |
| 1063214 | N/A | N/A | 4390 | 4405 | GACACCACGGAGGAAG | 45 | 2202 |
| 1063245 | N/A | N/A | 4473 | 4488 | CTGGGCCCTGTTGTCA | 78 | 2203 |
| 1063277 | N/A | N/A | 4689 | 4704 | ACACATGTGGGATGGC | 87 | 2204 |
| 1063309 | N/A | N/A | 4847 | 4862 | ACTCAGTTGTGGTACT | 143 | 2205 |
| 1063341 | N/A | N/A | 5176 | 5191 | GAGAATCCAGGTATTA | 93 | 2206 |
| 1063373 | N/A | N/A | 5433 | 5448 | GTCCCATAGTGACTTG | 145 | 2207 |
| 1063405 | N/A | N/A | 5628 | 5643 | TCTATTGTCCTCACCT | 114 | 2208 |
| 1063437 | N/A | N/A | 5838 | 5853 | GTGTGATCATGCACGG | 31 | 2209 |
| 1063469 | N/A | N/A | 6000 | 6015 | GACATTACCTGAGATG | 98 | 2210 |
| 1063501 | N/A | N/A | 6110 | 6125 | ACTTAATCTGAAGCTG | 61 | 2211 |
| 1063533 | N/A | N/A | 6264 | 6279 | TTGCCCCAGTGACTAG | 104 | 2212 |
| 1063565 | N/A | N/A | 6424 | 6439 | CCCTGGTGTGGATGTG | 85 | 2213 |
| 1063597 | N/A | N/A | 6650 | 6665 | GGGCGGTATGAGATAC | 92 | 2214 |
| 1063629 | N/A | N/A | 7090 | 7105 | ATTTTCTTGGCCCTGC | 105 | 2215 |
| 1063661 | N/A | N/A | 7362 | 7377 | TGGTAGATGCTATGAT | 40 | 2216 |
| 1063693 | N/A | N/A | 7641 | 7656 | CATGTGGGCTGTGGTT | 40 | 2217 |
| 1063725 | N/A | N/A | 7916 | 7931 | GCCTCTGAGACCTGAC | 57 | 2218 |
| 1063757 | N/A | N/A | 8037 | 8052 | ACGGCCATTCGCAGGT | 24 | 2219 |
| 1063788 | N/A | N/A | 8475 | 8490 | GCCACTCACTTGAGGA | 150 | 2220 |
| 1063820 | N/A | N/A | 8766 | 8781 | GATTTTGATCAAGACA | 118 | 2221 |
| 1063852 | N/A | N/A | 8905 | 8920 | CTAGAGGAGCTAGAAC | 72 | 2222 |
| 1063884 | N/A | N/A | 9397 | 9412 | AGATTCCATGCAGGTG | 128 | 2223 |
| 1063916 | N/A | N/A | 9578 | 9593 | GAACTTGGTTTCTGGC | 53 | 2224 |
| 1063948 | N/A | N/A | 9873 | 9888 | ATGTGAGGTTAGGTTC | 20 | 2225 |
| 1063980 | N/A | N/A | 10416 | 10431 | GTGGTCGCCATCTTGA | 12 | 2226 |
| 1064012 | N/A | N/A | 10685 | 10700 | TATTAGAGCACAGGTG | 31 | 2227 |
| 1064044 | N/A | N/A | 11316 | 11331 | AGTGCAAGGACCATTC | 79 | 2228 |
| 1064076 | N/A | N/A | 11506 | 11521 | CACTCGAGACCATATG | 104 | 2229 |
| 1064110 | N/A | N/A | 11612 | 11627 | TTACTTAGCAGGGTCC | 84 | 2230 |
| 1064142 | N/A | N/A | 11675 | 11690 | TGAGCTCGGGCGAATC | 107 | 2231 |
| 1064174 | N/A | N/A | 11795 | 11810 | AGCGGAGTAACTTGCA | 33 | 2232 |
| 1064206 | N/A | N/A | 11889 | 11904 | GCACAGGTACTGTTTG | 83 | 2233 |
| 1064238 | N/A | N/A | 11969 | 11984 | CCTAGCTAGCTCCCTG | 32 | 2234 |
| 1064270 | N/A | N/A | 12191 | 12206 | GGAACCCACTCTGAGG | 106 | 2235 |
| 1064302 | N/A | N/A | 12361 | 12376 | GCTGAGGTGGACATCT | 106 | 2236 |
| 1064334 | N/A | N/A | 12531 | 12546 | GGTGTATTGACATACT | 52 | 2237 |
| 1064366 | N/A | N/A | 12732 | 12747 | TCAGGGTTTCAGTTCA | 57 | 2238 |
| 1064398 | N/A | N/A | 12872 | 12887 | GGCAAGGATGAGGTTA | 120 | 2239 |
| 1064430 | N/A | N/A | 13158 | 13173 | TGAAAGGTCTGGGATG | 121 | 2240 |
| 1064462 | N/A | N/A | 13342 | 13357 | AGGTAATCAGGGACAG | 105 | 2241 |

TABLE 34
Inhibition of Foxp3 mRNA by 3-10-3 cEt gapmers targeting SEQ ID NO.: 1, and 2

| Compound | SEQ ID NO: 1 | SEQ ID NO: 1 | SEQ ID NO: 2 | SEQ ID NO: 2 | Sequence | FOXP3 | SEQ |
|---|---|---|---|---|---|---|---|
| Number | Start Site | Stop Site | Start Site | Stop Site | (5′ to 3′) | (% UTC) | ID NO |
| 910950 | 1434 | 1449 | 13844 | 13859 | GCCTCTGGCTCCGTTT | 15 | 94 |
| 911144 | N/A | N/A | 7355 | 7370 | TGCTATGATCATCCCC | 23 | 65 |
| 1062030 | 83 | 98 | 483 | 498 | CTTTGCTTTTATACCG | 3 | 2242 |
| 1062062 | 251 | 266 | 6789 | 6804 | CCAGCTGGGCGAGGCT | 107 | 2243 |
| 1062094 | 348 | 363 | 6886 | 6901 | AAGAGGAGGCATGGGC | 26 | 2244 |
| 1062126 | 556 | 571 | 7719 | 7734 | ATGGCTGGGCTCTCCA | 36 | 2245 |
| 1062158 | 728 | 743 | 8374 | 8389 | AGCCGAAAGGGTGCTG | 103 | 2246 |
| 1062190 | 843 | 858 | 9433 | 9448 | GAAGATGGTCCGCCTG | 59 | 2247 |
| 1062222 | 1015 | 1030 | 11171 | 11186 | CAGCAGGAGCCCTTGT | 104 | 2248 |
| 1062254 | 1167 | 1182 | 12037 | 12052 | TGAAGTAGTCCATGTT | 57* | 2249 |
| 1062286 | 1397 | 1412 | 13807 | 13822 | CACGGTCCACACAGCC | 76 | 2250 |
| 1062318 | 1554 | 1569 | 13964 | 13979 | AGGGCCTATCATCCCT | 74 | 2251 |
| 1062350 | 1804 | 1819 | 14214 | 14229 | CTGAAGTAATCTGTGC | 33 | 2252 |
| 1062382 | 1924 | 1939 | 14334 | 14349 | GTGATGATGCAGCTTT | 16 | 2253 |
| 1062414 | 2169 | 2184 | 14579 | 14594 | ACTCAAGAGACCCACT | 39 | 2254 |
| 1062446 | 2339 | 2354 | N/A | N/A | GGACGGTACTGTGGGT | 20 | 2255 |
| 1062478 | N/A | N/A | 13573 | 13588 | CACCGCCACCTCAGAG | 67 | 2256 |
| 1062510 | N/A | N/A | 13667 | 13682 | AACAACCCACATCCCG | 109 | 2257 |
| 1062542 | N/A | N/A | 674 | 689 | GAATCACGGTAGCTGG | 14 | 2258 |
| 1062574 | N/A | N/A | 828 | 843 | AGACTGGCAGCTGACA | 56 | 2259 |
| 1062606 | N/A | N/A | 1052 | 1067 | CCAGGAGAGATGCGGG | 85 | 2260 |
| 1062638 | N/A | N/A | 1224 | 1239 | TCGGCGACATTACTAT | 29 | 2261 |
| 1062670 | N/A | N/A | 1324 | 1339 | CAAAGTTCAGTTAAGT | 24 | 2262 |
| 1062703 | N/A | N/A | 1448 | 1463 | AATATGGACTCTGGTC | 50 | 2263 |
| 1062735 | N/A | N/A | 1703 | 1718 | ATCAAAGTTCATGCTG | 53 | 2264 |
| 1062767 | N/A | N/A | 1847 | 1862 | AGAGAGGGTCATAAAC | 45 | 2265 |
| 1062799 | N/A | N/A | 2065 | 2080 | GTAAGGACATGACCAG | 27 | 2266 |
| 1062831 | N/A | N/A | 2148 | 2163 | GCTGATGAAAGGTTAA | 31 | 2267 |
| 1062863 | N/A | N/A | 2352 | 2367 | CTAGAAGCCAACATAG | 75 | 2268 |
| 1062895 | N/A | N/A | 2526 | 2541 | TATTATAACCATTGCA | 32 | 2269 |
| 1062927 | N/A | N/A | 2716 | 2731 | ATCCCAACAACCCCTC | 50 | 2270 |
| 1062959 | N/A | N/A | 2846 | 2861 | ACATATGGAGAGAACT | 56 | 2271 |
| 1062991 | N/A | N/A | 3043 | 3058 | AGAACATTTGCTGGTC | 9 | 2272 |
| 1063023 | N/A | N/A | 3211 | 3226 | GCCCCTCTATCCAGGG | 76 | 2273 |
| 1063055 | N/A | N/A | 3359 | 3374 | CTGCATTTCGGTGAGG | 22 | 2274 |
| 1063087 | N/A | N/A | 3626 | 3641 | CCAACTAGGCCTCCTG | 81 | 2275 |
| 1063119 | N/A | N/A | 3850 | 3865 | CACTCCGCCAGAGATG | 31 | 2276 |
| 1063151 | N/A | N/A | 4073 | 4088 | GGATCCTAGAATCTCA | 60 | 2277 |
| 1063183 | N/A | N/A | 4198 | 4213 | AGAGGACCCAGGTTTG | 55 | 2278 |
| 1063215 | N/A | N/A | 4391 | 4406 | CGACACCACGGAGGAA | 68 | 2279 |
| 1063246 | N/A | N/A | 4477 | 4492 | GCATCTGGGCCCTGTT | 57 | 2280 |
| 1063278 | N/A | N/A | 4692 | 4707 | CAAACACATGTGGGAT | 87 | 2281 |
| 1063310 | N/A | N/A | 4870 | 4885 | GATCAATTTCTGTTGC | 11 | 2282 |
| 1063342 | N/A | N/A | 5177 | 5192 | TGAGAATCCAGGTATT | 38 | 2283 |
| 1063374 | N/A | N/A | 5435 | 5450 | TAGTCCCATAGTGACT | 104 | 2284 |
| 1063406 | N/A | N/A | 5630 | 5645 | CTTCTATTGTCCTCAC | 31 | 2285 |
| 1063438 | N/A | N/A | 5839 | 5854 | AGTGTGATCATGCACG | 96 | 2286 |
| 1063470 | N/A | N/A | 6001 | 6016 | TGACATTACCTGAGAT | 30 | 2287 |
| 1063502 | N/A | N/A | 6112 | 6127 | AGACTTAATCTGAAGC | 29 | 2288 |
| 1063534 | N/A | N/A | 6267 | 6282 | ATTTTGCCCCAGTGAC | 66 | 2289 |
| 1063566 | N/A | N/A | 6425 | 6440 | GCCCTGGTGTGGATGT | 79 | 2290 |
| 1063598 | N/A | N/A | 6651 | 6666 | AGGGCGGTATGAGATA | 30 | 2291 |
| 1063630 | N/A | N/A | 7118 | 7133 | TCCAATCTCTGAGGCC | 45 | 2292 |
| 1063662 | N/A | N/A | 7363 | 7378 | ATGGTAGATGCTATGA | 57 | 2293 |
| 1063694 | N/A | N/A | 7662 | 7677 | ACCGTTGAGAGCTGGG | 35 | 2294 |
| 1063726 | N/A | N/A | 7928 | 7943 | TGGAGTTTCCAAGCCT | 67 | 2295 |
| 1063758 | N/A | N/A | 8038 | 8053 | GACGGCCATTCGCAGG | 54 | 2296 |
| 1063789 | N/A | N/A | 8497 | 8512 | CGGTAGACTGGCACAG | 58 | 2297 |
| 1063821 | N/A | N/A | 8773 | 8788 | ACTGGGAGATTTTGAT | 104 | 2298 |
| 1063853 | N/A | N/A | 8906 | 8921 | TCTAGAGGAGCTAGAA | 38 | 2299 |
| 1063885 | N/A | N/A | 9405 | 9420 | TAGGGAGAAGATTCCA | 83 | 2300 |
| 1063917 | N/A | N/A | 9582 | 9597 | AGGTGAACTTGGTTTC | 20 | 2301 |
| 1063949 | N/A | N/A | 9879 | 9894 | ACCTGAATGTGAGGTT | 42 | 2302 |
| 1063981 | N/A | N/A | 10418 | 10433 | CTGTGGTCGCCATCTT | 4 | 2303 |
| 1064013 | N/A | N/A | 10694 | 10709 | AGCCGTATTTATTAGA | 29 | 2304 |
| 1064045 | N/A | N/A | 11317 | 11332 | TAGTGCAAGGACCATT | 33 | 2305 |
| 1064077 | N/A | N/A | 11507 | 11522 | ACACTCGAGACCATAT | 93 | 2306 |
| 1064111 | N/A | N/A | 11613 | 11628 | ATTACTTAGCAGGGTC | 22 | 2307 |
| 1064143 | N/A | N/A | 11677 | 11692 | GGTGAGCTCGGGCGAA | 36 | 2308 |
| 1064175 | N/A | N/A | 11796 | 11811 | AAGCGGAGTAACTTGC | 50 | 2309 |
| 1064207 | N/A | N/A | 11891 | 11906 | GGGCACAGGTACTGTT | 60 | 2310 |
| 1064239 | N/A | N/A | 11970 | 11985 | TCCTAGCTAGCTCCCT | 35 | 2311 |
| 1064271 | N/A | N/A | 12192 | 12207 | AGGAACCCACTCTGAG | 49 | 2312 |
| 1064303 | N/A | N/A | 12362 | 12377 | GGCTGAGGTGGACATC | 23 | 2313 |
| 1064335 | N/A | N/A | 12553 | 12568 | TTGGGAATGGTGCCCA | 35 | 2314 |
| 1064367 | N/A | N/A | 12738 | 12753 | GCTAGGTCAGGGTTTC | 68 | 2315 |
| 1064399 | N/A | N/A | 12884 | 12899 | GGTTAGGCTCAGGGCA | 71 | 2316 |
| 1064431 | N/A | N/A | 13159 | 13174 | GTGAAAGGTCTGGGAT | 89 | 2317 |
| 1064463 | N/A | N/A | 13344 | 13359 | GCAGGTAATCAGGGAC | 86 | 2318 |

TABLE 35
Inhibition of Foxp3 mRNA by 3-10-3 cEt gapmers targeting
SEQ ID NO.: 1, and 2

| | SEQ ID | SEQ ID | SEQ ID | SEQ ID | | | |
|---|---|---|---|---|---|---|---|
| | NO: 1 | NO: 1 | NO: 2 | NO: 2 | | FOXP3 | SEQ |
| Compound | Start | Stop | Start | Stop | | (% | ID |
| Number | Site | Site | Site | Site | Sequence (5′ to 3′) | UTC) | NO |
| 911144 | N/A | N/A | 7355 | 7370 | TGCTATGATCATCCCC | 42 | 65 |
| 911179 | N/A | N/A | 10316 | 10331 | GCTTTAACAACTCAGG | 19 | 306 |
| 1062031 | 97 | 112 | 497 | 512 | CGTATCAAAAACAACT | 98 | 2319 |
| 1062063 | 268 | 283 | 6806 | 6821 | GCTTTGGGTGCAGCCC | 104 | 2320 |
| 1062095 | 375 | 390 | 6913 | 6928 | GCGATGGTGGCATGGG | 67 | 2321 |
| 1062127 | 559 | 574 | 7722 | 7737 | ATCATGGCTGGGCTCT | 57 | 2322 |
| 1062159 | 729 | 744 | 8375 | 8390 | CAGCCGAAAGGGTGCT | 136 | 2323 |
| 1062191 | 844 | 859 | 9434 | 9449 | AGAAGATGGTCCGCCT | 48 | 2324 |
| 1062223 | 1023 | 1038 | 11179 | 11194 | CTACGATGCAGCAGGA | 65 | 2325 |
| 1062255 | 1170 | 1185 | 12040 | 12055 | ACTTGAAGTAGTCCAT | 56* | 2326 |
| 1062287 | 1413 | 1428 | 13823 | 13838 | GGAACTCCAGCTCATC | 85 | 2327 |
| 1062319 | 1555 | 1570 | 13965 | 13980 | CAGGGCCTATCATCCC | 103 | 2328 |
| 1062351 | 1805 | 1820 | 14215 | 14230 | CCTGAAGTAATCTGTG | 102 | 2329 |
| 1062383 | 1925 | 1940 | 14335 | 14350 | TGTGATGATGCAGCTT | 14 | 2330 |
| 1062415 | 2173 | 2188 | 14583 | 14598 | CGGGACTCAAGAGACC | 93 | 2331 |
| 1062447 | 2357 | 2372 | N/A | N/A | TCGGCTGCAGTTTATT | 36 | 2332 |
| 1062479 | N/A | N/A | 13576 | 13591 | AGTCACCGCCACCTCA | 53 | 2333 |
| 1062511 | N/A | N/A | 13668 | 13683 | CAACAACCCACATCCC | 97 | 2334 |
| 1062543 | N/A | N/A | 675 | 690 | GGAATCACGGTAGCTG | 31 | 2335 |
| 1062575 | N/A | N/A | 829 | 844 | AAGACTGGCAGCTGAC | 56 | 2336 |
| 1062607 | N/A | N/A | 1053 | 1068 | GCCAGGAGAGATGCGG | 124 | 2337 |
| 1062639 | N/A | N/A | 1225 | 1240 | CTCGGCGACATTACTA | 41 | 2338 |
| 1062671 | N/A | N/A | 1325 | 1340 | GCAAAGTTCAGTTAAG | 53 | 2339 |
| 1062704 | N/A | N/A | 1449 | 1464 | GAATATGGACTCTGGT | 74 | 2340 |
| 1062736 | N/A | N/A | 1705 | 1720 | CAATCAAAGTTCATGC | 63 | 2341 |
| 1062768 | N/A | N/A | 1848 | 1863 | CAGAGAGGGTCATAAA | 72 | 2342 |
| 1062800 | N/A | N/A | 2066 | 2081 | AGTAAGGACATGACCA | 66 | 2343 |
| 1062832 | N/A | N/A | 2149 | 2164 | GGCTGATGAAAGGTTA | 11 | 2344 |
| 1062864 | N/A | N/A | 2353 | 2368 | ACTAGAAGCCAACATA | 110 | 2345 |
| 1062896 | N/A | N/A | 2527 | 2542 | CTATTATAACCATTGC | 44 | 2346 |
| 1062928 | N/A | N/A | 2718 | 2733 | TTATCCCAACAACCCC | 58 | 2347 |
| 1062960 | N/A | N/A | 2847 | 2862 | CACATATGGAGAGAAC | 84 | 2348 |
| 1062992 | N/A | N/A | 3058 | 3073 | GGATTGCCTCAAATAA | 69 | 2349 |
| 1063024 | N/A | N/A | 3216 | 3231 | CAATTGCCCCTCTATC | 85 | 2350 |
| 1063056 | N/A | N/A | 3368 | 3383 | ACTCTGCCGCTGCATT | 69 | 2351 |
| 1063088 | N/A | N/A | 3627 | 3642 | GCCAACTAGGCCTCCT | 112 | 2352 |
| 1063120 | N/A | N/A | 3853 | 3868 | GGCCACTCCGCCAGAG | 127 | 2353 |
| 1063152 | N/A | N/A | 4075 | 4090 | AAGGATCCTAGAATCT | 70 | 2354 |
| 1063184 | N/A | N/A | 4199 | 4214 | GAGAGGACCCAGGTTT | 83 | 2355 |
| 1063216 | N/A | N/A | 4393 | 4408 | ATCGACACCACGGAGG | 74 | 2356 |
| 1063247 | N/A | N/A | 4497 | 4512 | ATGTTTTCATATCGGG | 39 | 2357 |
| 1063279 | N/A | N/A | 4693 | 4708 | CCAAACACATGTGGGA | 113 | 2358 |
| 1063311 | N/A | N/A | 4943 | 4958 | CCTTATGGCCCCCAGA | 99 | 2359 |
| 1063343 | N/A | N/A | 5178 | 5193 | GTGAGAATCCAGGTAT | 55 | 2360 |
| 1063375 | N/A | N/A | 5440 | 5455 | TTCCGTAGTCCCATAG | 103 | 2361 |
| 1063407 | N/A | N/A | 5633 | 5648 | GCTCTTCTATTGTCCT | 64 | 2362 |
| 1063439 | N/A | N/A | 5845 | 5860 | TCCAGGAGTGTGATCA | 106 | 2363 |
| 1063471 | N/A | N/A | 6003 | 6018 | GCTGACATTACCTGAG | 83 | 2364 |
| 1063503 | N/A | N/A | 6116 | 6131 | TCTGAGACTTAATCTG | 95 | 2365 |
| 1063535 | N/A | N/A | 6269 | 6284 | CTATTTTGCCCCAGTG | 92 | 2366 |
| 1063567 | N/A | N/A | 6426 | 6441 | AGCCCTGGTGTGGATG | 125 | 2367 |
| 1063599 | N/A | N/A | 6654 | 6669 | GCTAGGGCGGTATGAG | 127 | 2368 |
| 1063631 | N/A | N/A | 7119 | 7134 | CTCCAATCTCTGAGGC | 99 | 2369 |
| 1063663 | N/A | N/A | 7364 | 7379 | CATGGTAGATGCTATG | 110 | 2370 |
| 1063695 | N/A | N/A | 7793 | 7808 | TACCAGGTGGGAGGCC | 106 | 2371 |
| 1063727 | N/A | N/A | 7959 | 7974 | TAAGGTTCTGCACCTG | 123 | 2372 |
| 1063759 | N/A | N/A | 8039 | 8054 | AGACGGCCATTCGCAG | 70 | 2373 |
| 1063790 | N/A | N/A | 8499 | 8514 | GCCGGTAGACTGGCAC | 88 | 2374 |
| 1063822 | N/A | N/A | 8776 | 8791 | GGAACTGGGAGATTTT | 39 | 2375 |
| 1063854 | N/A | N/A | 8907 | 8922 | ATCTAGAGGAGCTAGA | 117 | 2376 |
| 1063886 | N/A | N/A | 9406 | 9421 | GTAGGGAGAAGATTCC | 120 | 2377 |
| 1063918 | N/A | N/A | 9584 | 9599 | CCAGGTGAACTTGGTT | 99 | 2378 |
| 1063950 | N/A | N/A | 9893 | 9908 | CCCTAGCTCTCAGGAC | 152 | 2379 |
| 1063982 | N/A | N/A | 10419 | 10434 | TCTGTGGTCGCCATCT | 31 | 2380 |
| 1064014 | N/A | N/A | 10698 | 10713 | CATGAGCCGTATTTAT | 56 | 2381 |
| 1064046 | N/A | N/A | 11318 | 11333 | GTAGTGCAAGGACCAT | 73 | 2382 |
| 1064078 | N/A | N/A | 11509 | 11524 | CGACACTCGAGACCAT | 128 | 2383 |
| 1064112 | N/A | N/A | 11614 | 11629 | AATTACTTAGCAGGGT | 90 | 2384 |
| 1064144 | N/A | N/A | 11681 | 11696 | GATAGGTGAGCTCGGG | 52 | 2385 |
| 1064176 | N/A | N/A | 11797 | 11812 | GAAGCGGAGTAACTTG | 102 | 2386 |
| 1064208 | N/A | N/A | 11893 | 11908 | ACGGGCACAGGTACTG | 89 | 2387 |
| 1064240 | N/A | N/A | 11971 | 11986 | CTCCTAGCTAGCTCCC | 75 | 2388 |
| 1064272 | N/A | N/A | 12193 | 12208 | GAGGAACCCACTCTGA | 91 | 2389 |
| 1064304 | N/A | N/A | 12378 | 12393 | AGAGGGTTAGGTATGG | 97 | 2390 |
| 1064336 | N/A | N/A | 12559 | 12574 | GAAAGGTTGGGAATGG | 88 | 2391 |
| 1064368 | N/A | N/A | 12762 | 12777 | AGTGAGGCTATCAGTC | 84 | 2392 |
| 1064400 | N/A | N/A | 12891 | 12906 | GTTAGGTGGTTAGGCT | 64 | 2393 |
| 1064432 | N/A | N/A | 13160 | 13175 | GGTGAAAGGTCTGGGA | 79 | 2394 |
| 1064464 | N/A | N/A | 13375 | 13390 | AGCCATCTGACATGGG | 144 | 2395 |

TABLE 36
Inhibition of Foxp3 mRNA by 3-10-3 cEt gapmers targeting
SEQ ID NO.: 1, and 2

| | SEQ ID | SEQ ID | SEQ ID | SEQ ID | | | |
|---|---|---|---|---|---|---|---|
| | NO: 1 | NO: 1 | NO: 2 | NO: 2 | | FOXP3 | SEQ |
| Compound | Start | Stop | Start | Stop | | (% | ID |
| Number | Site | Site | Site | Site | Sequence (5′ to 3′) | UTC) | NO |
| 911144 | N/A | N/A | 7355 | 7370 | TGCTATGATCATCCCC | 23 | 65 |
| 911179 | N/A | N/A | 10316 | 10331 | GCTTTAACAACTCAGG | 20 | 306 |
| 1062032 | 111 | 126 | 511 | 526 | GTGGGAAACTGTCACG | 51 | 2396 |
| 1062064 | 270 | 285 | 6808 | 6823 | AGGCTTTGGGTGCAGC | 247 | 2397 |
| 1062096 | 377 | 392 | 6915 | 6930 | CTGCGATGGTGGCATG | 236 | 2398 |
| 1062128 | 563 | 578 | 7726 | 7741 | GCTGATCATGGCTGGG | 94 | 2399 |
| 1062160 | 730 | 745 | 8376 | 8391 | ACAGCCGAAAGGGTGC | 306 | 2400 |
| 1062192 | 845 | 860 | 9435 | 9450 | CAGAAGATGGTCCGCC | 245 | 2401 |
| 1062224 | 1025 | 1040 | 11181 | 11196 | AGCTACGATGCAGCAG | 124 | 2402 |
| 1062256 | 1171 | 1186 | 12041 | 12056 | AACTTGAAGTAGTCCA | 44* | 2403 |
| 1062288 | 1414 | 1429 | 13824 | 13839 | CGGAACTCCAGCTCAT | 224 | 2404 |
| 1062320 | 1556 | 1571 | 13966 | 13981 | CCAGGGCCTATCATCC | 62 | 2405 |
| 1062352 | 1806 | 1821 | 14216 | 14231 | CCCTGAAGTAATCTGT | 75 | 2406 |
| 1062384 | 1926 | 1941 | 14336 | 14351 | GTGTGATGATGCAGCT | 38 | 2407 |
| 1062416 | 2174 | 2189 | 14584 | 14599 | ACGGGACTCAAGAGAC | 118 | 2408 |
| 1062448 | 2358 | 2373 | N/A | N/A | CTCGGCTGCAGTTTAT | 24 | 2409 |
| 1062480 | N/A | N/A | 13579 | 13594 | CCCAGTCACCGCCACC | 51 | 2410 |
| 1062512 | N/A | N/A | 13669 | 13684 | CCAACAACCCACATCC | 249 | 2411 |
| 1062544 | N/A | N/A | 676 | 691 | TGGAATCACGGTAGCT | 72 | 2412 |
| 1062576 | N/A | N/A | 833 | 848 | CATAAAGACTGGCAGC | 77 | 2413 |
| 1062608 | N/A | N/A | 1054 | 1069 | GGCCAGGAGAGATGCG | 121 | 2414 |
| 1062640 | N/A | N/A | 1227 | 1242 | TCCTCGGCGACATTAC | 163 | 2415 |
| 1062672 | N/A | N/A | 1332 | 1347 | GATACAAGCAAAGTTC | 177 | 2416 |
| 1062705 | N/A | N/A | 1451 | 1466 | CTGAATATGGACTCTG | 88 | 2417 |
| 1062737 | N/A | N/A | 1706 | 1721 | TCAATCAAAGTTCATG | 24 | 2418 |
| 1062769 | N/A | N/A | 1849 | 1864 | GCAGAGAGGGTCATAA | 76 | 2419 |
| 1062801 | N/A | N/A | 2067 | 2082 | GAGTAAGGACATGACC | 110 | 2420 |
| 1062833 | N/A | N/A | 2151 | 2166 | ATGGCTGATGAAAGGT | 24 | 2421 |
| 1062865 | N/A | N/A | 2354 | 2369 | GACTAGAAGCCAACAT | 163 | 2422 |
| 1062897 | N/A | N/A | 2542 | 2557 | CTCCTGAGGAAGGTAC | 61 | 2423 |
| 1062929 | N/A | N/A | 2720 | 2735 | CATTATCCCAACAACC | 80 | 2424 |
| 1062961 | N/A | N/A | 2850 | 2865 | ACCCACATATGGAGAG | 218 | 2425 |
| 1062993 | N/A | N/A | 3060 | 3075 | GAGGATTGCCTCAAAT | 130 | 2426 |
| 1063025 | N/A | N/A | 3227 | 3242 | CTTCAAGTTGACAATT | 61 | 2427 |
| 1063057 | N/A | N/A | 3375 | 3390 | GATTTCAACTCTGCCG | 38 | 2428 |
| 1063089 | N/A | N/A | 3628 | 3643 | GGCCAACTAGGCCTCC | 202 | 2429 |
| 1063121 | N/A | N/A | 3855 | 3870 | ATGGCCACTCCGCCAG | 254 | 2430 |
| 1063153 | N/A | N/A | 4076 | 4091 | AAAGGATCCTAGAATC | 277 | 2431 |
| 1063185 | N/A | N/A | 4200 | 4215 | GGAGAGGACCCAGGTT | 53 | 2432 |
| 1063217 | N/A | N/A | 4394 | 4409 | CATCGACACCACGGAG | 73 | 2433 |
| 1063248 | N/A | N/A | 4498 | 4513 | TATGTTTTCATATCGG | 20 | 2434 |
| 1063280 | N/A | N/A | 4694 | 4709 | CCCAAACACATGTGGG | 206 | 2435 |
| 1063312 | N/A | N/A | 4944 | 4959 | CCCTTATGGCCCCCAG | 57 | 2436 |
| 1063344 | N/A | N/A | 5180 | 5195 | GTGTGAGAATCCAGGT | 86 | 2437 |
| 1063376 | N/A | N/A | 5446 | 5461 | GCCGAGTTCCGTAGTC | 70 | 2438 |
| 1063408 | N/A | N/A | 5644 | 5659 | ACGCAAGACCTGCTCT | 198 | 2439 |
| 1063440 | N/A | N/A | 5846 | 5861 | GTCCAGGAGTGTGATC | 71 | 2440 |
| 1063472 | N/A | N/A | 6004 | 6019 | AGCTGACATTACCTGA | 63 | 2441 |
| 1063504 | N/A | N/A | 6119 | 6134 | GATTCTGAGACTTAAT | 62 | 2442 |
| 1063536 | N/A | N/A | 6270 | 6285 | CCTATTTTGCCCCAGT | 89 | 2443 |
| 1063568 | N/A | N/A | 6427 | 6442 | CAGCCCTGGTGTGGAT | 59 | 2444 |
| 1063600 | N/A | N/A | 6656 | 6671 | GTGCTAGGGCGGTATG | 76 | 2445 |
| 1063632 | N/A | N/A | 7121 | 7136 | GCCTCCAATCTCTGAG | 228 | 2446 |
| 1063664 | N/A | N/A | 7368 | 7383 | CCCACATGGTAGATGC | 222 | 2447 |
| 1063696 | N/A | N/A | 7795 | 7810 | GTTACCAGGTGGGAGG | 51 | 2448 |
| 1063728 | N/A | N/A | 7960 | 7975 | TTAAGGTTCTGCACCT | 92 | 2449 |
| 1063760 | N/A | N/A | 8040 | 8055 | AAGACGGCCATTCGCA | 61 | 2450 |
| 1063791 | N/A | N/A | 8501 | 8516 | GGGCCGGTAGACTGGC | 102 | 2451 |
| 1063823 | N/A | N/A | 8787 | 8802 | TCTGTCACTCAGGAAC | 104 | 2452 |
| 1063855 | N/A | N/A | 8908 | 8923 | CATCTAGAGGAGCTAG | 88 | 2453 |
| 1063887 | N/A | N/A | 9407 | 9422 | AGTAGGGAGAAGATTC | 82 | 2454 |
| 1063919 | N/A | N/A | 9585 | 9600 | CCCAGGTGAACTTGGT | 71 | 2455 |
| 1063951 | N/A | N/A | 9918 | 9933 | CATGTTTGGAGCTGGG | 76 | 2456 |
| 1063983 | N/A | N/A | 10448 | 10463 | TATGTGGCACCCTGTG | 100 | 2457 |
| 1064015 | N/A | N/A | 10706 | 10721 | CAAAACAGCATGAGCC | 93 | 2458 |
| 1064047 | N/A | N/A | 11342 | 11357 | GGATTAGGAGCTTGGG | 26 | 2459 |
| 1064079 | N/A | N/A | 11511 | 11526 | CCCGACACTCGAGACC | 50 | 2460 |
| 1064113 | N/A | N/A | 11616 | 11631 | GGAATTACTTAGCAGG | 30 | 2461 |
| 1064145 | N/A | N/A | 11682 | 11697 | GGATAGGTGAGCTCGG | 27 | 2462 |
| 1064177 | N/A | N/A | 11798 | 11813 | AGAAGCGGAGTAACTT | 94 | 2463 |
| 1064209 | N/A | N/A | 11894 | 11909 | CACGGGCACAGGTACT | 69 | 2464 |
| 1064241 | N/A | N/A | 11972 | 11987 | CCTCCTAGCTAGCTCC | 123 | 2465 |
| 1064273 | N/A | N/A | 12194 | 12209 | GGAGGAACCCACTCTG | 97 | 2466 |
| 1064305 | N/A | N/A | 12379 | 12394 | GAGAGGGTTAGGTATG | 162 | 2467 |
| 1064337 | N/A | N/A | 12565 | 12580 | TACAAGGAAAGGTTGG | 87 | 2468 |
| 1064369 | N/A | N/A | 12775 | 12790 | CGATGATGATTGCAGT | 70 | 2469 |
| 1064401 | N/A | N/A | 12892 | 12907 | GGTTAGGTGGTTAGGC | 75 | 2470 |
| 1064433 | N/A | N/A | 13162 | 13177 | GAGGTGAAAGGTCTGG | 36 | 2471 |
| 1064465 | N/A | N/A | 13379 | 13394 | CCCGAGCCATCTGACA | 88 | 2472 |

TABLE 37
Inhibition of Foxp3 mRNA by 3-10-3 cEt gapmers targeting
SEQ ID NO.: 1, and 2

| | SEQ ID | SEQ ID | SEQ ID | SEQ ID | | | |
|---|---|---|---|---|---|---|---|
| | NO: 1 | NO: 1 | NO: 2 | NO: 2 | | FOXP3 | SEQ |
| Compound | Start | Stop | Start | Stop | | (% | ID |
| Number | Site | Site | Site | Site | Sequence (5′ to 3′) | UTC) | NO |
| 911144 | N/A | N/A | 7355 | 7370 | TGCTATGATCATCCCC | 35 | 65 |
| 911179 | N/A | N/A | 10316 | 10331 | GCTTTAACAACTCAGG | 15 | 306 |
| 1062033 | 113 | 128 | 513 | 528 | TTGTGGGAAACTGTCA | 51 | 2473 |
| 1062065 | 280 | 295 | 6818 | 6833 | AGCAGGTCTGAGGCTT | 101 | 2474 |
| 1062097 | 378 | 393 | 6916 | 6931 | GCTGCGATGGTGGCAT | 81 | 2475 |
| 1062129 | 566 | 581 | 7729 | 7744 | GAGGCTGATCATGGCT | 47 | 2476 |
| 1062161 | 732 | 747 | 8378 | 8393 | GCACAGCCGAAAGGGT | 72 | 2477 |
| 1062193 | 846 | 861 | 9436 | 9451 | CCAGAAGATGGTCCGC | 71 | 2478 |
| 1062225 | 1026 | 1041 | 11182 | 11197 | CAGCTACGATGCAGCA | 108 | 2479 |
| 1062257 | 1172 | 1187 | 12042 | 12057 | GAACTTGAAGTAGTCC | 80* | 2480 |
| 1062289 | 1415 | 1430 | 13825 | 13840 | GCGGAACTCCAGCTCA | 95 | 2481 |
| 1062321 | 1558 | 1573 | 13968 | 13983 | ATCCAGGGCCTATCAT | 74 | 2482 |
| 1062353 | 1807 | 1822 | 14217 | 14232 | GCCCTGAAGTAATCTG | 65 | 2483 |
| 1062385 | 1927 | 1942 | 14337 | 14352 | TGTGTGATGATGCAGC | 32 | 2484 |
| 1062417 | 2175 | 2190 | 14585 | 14600 | CACGGGACTCAAGAGA | 54 | 2485 |
| 1062449 | 2361 | 2376 | N/A | N/A | GAGCTCGGCTGCAGTT | 88 | 2486 |
| 1062481 | N/A | N/A | 13580 | 13595 | TCCCAGTCACCGCCAC | 40 | 2487 |
| 1062513 | N/A | N/A | 13671 | 13686 | CACCAACAACCCACAT | 68 | 2488 |
| 1062545 | N/A | N/A | 677 | 692 | CTGGAATCACGGTAGC | 36 | 2489 |
| 1062577 | N/A | N/A | 836 | 851 | ATCCATAAAGACTGGC | 53 | 2490 |
| 1062609 | N/A | N/A | 1092 | 1107 | TCAAGATGGAGGAGAC | 109 | 2491 |
| 1062641 | N/A | N/A | 1233 | 1248 | TAAAGGTCCTCGGCGA | 30 | 2492 |
| 1062673 | N/A | N/A | 1333 | 1348 | CGATACAAGCAAAGTT | 79 | 2493 |
| 1062706 | N/A | N/A | 1452 | 1467 | CCTGAATATGGACTCT | 61 | 2494 |
| 1062738 | N/A | N/A | 1712 | 1727 | GTCAAATCAATCAAAG | 65 | 2495 |
| 1062770 | N/A | N/A | 1854 | 1869 | AATTAGCAGAGAGGGT | 75 | 2496 |
| 1062802 | N/A | N/A | 2069 | 2084 | AGGAGTAAGGACATGA | 18 | 2497 |
| 1062834 | N/A | N/A | 2154 | 2169 | GTAATGGCTGATGAAA | 39 | 2498 |
| 1062866 | N/A | N/A | 2355 | 2370 | AGACTAGAAGCCAACA | 83 | 2499 |
| 1062898 | N/A | N/A | 2543 | 2558 | ACTCCTGAGGAAGGTA | 76 | 2500 |
| 1062930 | N/A | N/A | 2721 | 2736 | CCATTATCCCAACAAC | 79 | 2501 |
| 1062962 | N/A | N/A | 2860 | 2875 | TTGGACATGGACCCAC | 89 | 2502 |
| 1062994 | N/A | N/A | 3061 | 3076 | GGAGGATTGCCTCAAA | 115 | 2503 |
| 1063026 | N/A | N/A | 3231 | 3246 | AGGGCTTCAAGTTGAC | 71 | 2504 |
| 1063058 | N/A | N/A | 3376 | 3391 | GGATTTCAACTCTGCC | 24 | 2505 |
| 1063090 | N/A | N/A | 3634 | 3649 | CGCTCTGGCCAACTAG | 59 | 2506 |
| 1063122 | N/A | N/A | 3859 | 3874 | ATACATGGCCACTCCG | 93 | 2507 |
| 1063154 | N/A | N/A | 4077 | 4092 | TAAAGGATCCTAGAAT | 83 | 2508 |
| 1063186 | N/A | N/A | 4210 | 4225 | CTTGGGTTGTGGAGAG | 58 | 2509 |
| 1063218 | N/A | N/A | 4395 | 4410 | TCATCGACACCACGGA | 77 | 2510 |
| 1063249 | N/A | N/A | 4499 | 4514 | TTATGTTTTCATATCG | 50 | 2511 |
| 1063281 | N/A | N/A | 4695 | 4710 | CCCCAAACACATGTGG | 135 | 2512 |
| 1063313 | N/A | N/A | 5000 | 5015 | TAACAAAGATTGCCAG | 75 | 2513 |
| 1063345 | N/A | N/A | 5185 | 5200 | GATGAGTGTGAGAATC | 81 | 2514 |
| 1063377 | N/A | N/A | 5448 | 5463 | ATGCCGAGTTCCGTAG | 46 | 2515 |
| 1063409 | N/A | N/A | 5645 | 5660 | CACGCAAGACCTGCTC | 81 | 2516 |
| 1063441 | N/A | N/A | 5850 | 5865 | GCGAGTCCAGGAGTGT | 46 | 2517 |
| 1063473 | N/A | N/A | 6008 | 6023 | ACCGAGCTGACATTAC | 79 | 2518 |
| 1063505 | N/A | N/A | 6122 | 6137 | GTAGATTCTGAGACTT | 74 | 2519 |
| 1063537 | N/A | N/A | 6272 | 6287 | GTCCTATTTTGCCCCA | 40 | 2520 |
| 1063569 | N/A | N/A | 6435 | 6450 | CGCTAGCACAGCCCTG | 102 | 2521 |
| 1063601 | N/A | N/A | 6673 | 6688 | GGAAAGGAGTCACACG | 117 | 2522 |
| 1063633 | N/A | N/A | 7126 | 7141 | GGAGAGCCTCCAATCT | 95 | 2523 |
| 1063665 | N/A | N/A | 7369 | 7384 | GCCCACATGGTAGATG | 76 | 2524 |
| 1063697 | N/A | N/A | 7796 | 7811 | TGTTACCAGGTGGGAG | 107 | 2525 |
| 1063729 | N/A | N/A | 7961 | 7976 | TTTAAGGTTCTGCACC | 106 | 2526 |
| 1063761 | N/A | N/A | 8041 | 8056 | AAAGACGGCCATTCGC | 51 | 2527 |
| 1063792 | N/A | N/A | 8511 | 8526 | CCACAAGCCAGGGCCG | 88 | 2528 |
| 1063824 | N/A | N/A | 8820 | 8835 | CTAGAGCCTGGCTACA | 70 | 2529 |
| 1063856 | N/A | N/A | 8909 | 8924 | CCATCTAGAGGAGCTA | 79 | 2530 |
| 1063888 | N/A | N/A | 9409 | 9424 | TAAGTAGGGAGAAGAT | 94 | 2531 |
| 1063920 | N/A | N/A | 9586 | 9601 | TCCCAGGTGAACTTGG | 88 | 2532 |
| 1063952 | N/A | N/A | 9922 | 9937 | TGGGCATGTTTGGAGC | 59 | 2533 |
| 1063984 | N/A | N/A | 10450 | 10465 | GTTATGTGGCACCCTG | 36 | 2534 |
| 1064016 | N/A | N/A | 10717 | 10732 | GTGGAATCCCACAAAA | 103 | 2535 |
| 1064048 | N/A | N/A | 11344 | 11359 | CAGGATTAGGAGCTTG | 80 | 2536 |
| 1064080 | N/A | N/A | 11512 | 11527 | GCCCGACACTCGAGAC | 64 | 2537 |
| 1064114 | N/A | N/A | 11618 | 11633 | CTGGAATTACTTAGCA | 57 | 2538 |
| 1064146 | N/A | N/A | 11685 | 11700 | AGTGGATAGGTGAGCT | 63 | 2539 |
| 1064178 | N/A | N/A | 11799 | 11814 | AAGAAGCGGAGTAACT | 99 | 2540 |
| 1064210 | N/A | N/A | 11895 | 11910 | CCACGGGCACAGGTAC | 96 | 2541 |
| 1064242 | N/A | N/A | 11973 | 11988 | ACCTCCTAGCTAGCTC | 93 | 2542 |
| 1064274 | N/A | N/A | 12195 | 12210 | TGGAGGAACCCACTCT | 87 | 2543 |
| 1064306 | N/A | N/A | 12380 | 12395 | GGAGAGGGTTAGGTAT | N.D. | 2544 |
| 1064338 | N/A | N/A | 12566 | 12581 | TTACAAGGAAAGGTTG | 112 | 2545 |
| 1064370 | N/A | N/A | 12776 | 12791 | GCGATGATGATTGCAG | 109 | 2546 |
| 1064402 | N/A | N/A | 12920 | 12935 | TATCGAGTATCTTACG | 68 | 2547 |
| 1064434 | N/A | N/A | 13164 | 13179 | GTGAGGTGAAAGGTCT | 91 | 2548 |
| 1064466 | N/A | N/A | 13381 | 13396 | ACCCCGAGCCATCTGA | N.D. | 2549 |

TABLE 38
Inhibition of Foxp3 mRNA by 3-10-3 cEt gapmers targeting
SEQ ID NO.: 1, and 2

| | SEQ ID | SEQ ID | SEQ ID | SEQ ID | | | |
|---|---|---|---|---|---|---|---|
| | NO: 1 | NO: 1 | NO: 2 | NO: 2 | | FOXP3 | SEQ |
| Compound | Start | Stop | Start | Stop | | (% | ID |
| Number | Site | Site | Site | Site | Sequence (5′ to 3′) | UTC) | NO |
| 911144 | N/A | N/A | 7355 | 7370 | TGCTATGATCATCCCC | 38 | 65 |
| 911179 | N/A | N/A | 10316 | 10331 | GCTTTAACAACTCAGG | 24 | 306 |
| 1062034 | 114 | 129 | 514 | 529 | CTTGTGGGAAACTGTC | 23 | 2550 |
| 1062066 | 289 | 304 | 6827 | 6842 | CGGGCCCCCAGCAGGT | 87 | 2551 |
| 1062098 | 379 | 394 | 6917 | 6932 | AGCTGCGATGGTGGCA | 89 | 2552 |
| 1062130 | 569 | 584 | 7732 | 7747 | TGTGAGGCTGATCATG | 65 | 2553 |
| 1062162 | 734 | 749 | 8380 | 8395 | GGGCACAGCCGAAAGG | 83 | 2554 |
| 1062194 | 847 | 862 | 9437 | 9452 | TCCAGAAGATGGTCCG | 73 | 2555 |
| 1062226 | 1027 | 1042 | 11183 | 11198 | GCAGCTACGATGCAGC | 116 | 2556 |
| 1062258 | 1173 | 1188 | 12043 | 12058 | GGAACTTGAAGTAGTC | 40* | 2557 |
| 1062290 | 1417 | 1432 | 13827 | 13842 | TTGCGGAACTCCAGCT | 112 | 2558 |
| 1062322 | 1569 | 1584 | 13979 | 13994 | CCTGTGGGCACATCCA | 33 | 2559 |
| 1062354 | 1808 | 1823 | 14218 | 14233 | AGCCCTGAAGTAATCT | 62 | 2560 |
| 1062386 | 1934 | 1949 | 14344 | 14359 | GTGTGATTGTGTGATG | 32 | 2561 |
| 1062418 | 2176 | 2191 | 14586 | 14601 | GCACGGGACTCAAGAG | 50 | 2562 |
| 1062450 | 2362 | 2377 | N/A | N/A | GGAGCTCGGCTGCAGT | 86 | 2563 |
| 1062482 | N/A | N/A | 13583 | 13598 | CCATCCCAGTCACCGC | 62 | 2564 |
| 1062514 | N/A | N/A | 13695 | 13710 | TCAACCTCTGAGGCCA | 78 | 2565 |
| 1062546 | N/A | N/A | 678 | 693 | GCTGGAATCACGGTAG | 41 | 2566 |
| 1062578 | N/A | N/A | 856 | 871 | AAGTTGTTCAAAGCTC | 40 | 2567 |
| 1062610 | N/A | N/A | 1093 | 1108 | GTCAAGATGGAGGAGA | 78 | 2568 |
| 1062642 | N/A | N/A | 1234 | 1249 | GTAAAGGTCCTCGGCG | 37 | 2569 |
| 1062674 | N/A | N/A | 1334 | 1349 | GCGATACAAGCAAAGT | 56 | 2570 |
| 1062707 | N/A | N/A | 1453 | 1468 | TCCTGAATATGGACTC | 55 | 2571 |
| 1062739 | N/A | N/A | 1713 | 1728 | GGTCAAATCAATCAAA | 31 | 2572 |
| 1062771 | N/A | N/A | 1855 | 1870 | GAATTAGCAGAGAGGG | 30 | 2573 |
| 1062803 | N/A | N/A | 2070 | 2085 | TAGGAGTAAGGACATG | N.D. | 2574 |
| 1062835 | N/A | N/A | 2156 | 2171 | ATGTAATGGCTGATGA | 17 | 2575 |
| 1062867 | N/A | N/A | 2356 | 2371 | GAGACTAGAAGCCAAC | 80 | 2576 |
| 1062899 | N/A | N/A | 2544 | 2559 | GACTCCTGAGGAAGGT | 63 | 2577 |
| 1062931 | N/A | N/A | 2723 | 2738 | GTCCATTATCCCAACA | 45 | 2578 |
| 1062963 | N/A | N/A | 2861 | 2876 | CTTGGACATGGACCCA | 87 | 2579 |
| 1062995 | N/A | N/A | 3063 | 3078 | GAGGAGGATTGCCTCA | 99 | 2580 |
| 1063027 | N/A | N/A | 3232 | 3247 | CAGGGCTTCAAGTTGA | 67 | 2581 |
| 1063059 | N/A | N/A | 3386 | 3401 | ATCTAGGCTTGGATTT | 97 | 2582 |
| 1063091 | N/A | N/A | 3636 | 3651 | CACGCTCTGGCCAACT | 67 | 2583 |
| 1063123 | N/A | N/A | 3860 | 3875 | AATACATGGCCACTCC | 86 | 2584 |
| 1063155 | N/A | N/A | 4080 | 4095 | ATTTAAAGGATCCTAG | 118 | 2585 |
| 1063187 | N/A | N/A | 4213 | 4228 | CTTCTTGGGTTGTGGA | 37 | 2586 |
| 1063219 | N/A | N/A | 4396 | 4411 | TTCATCGACACCACGG | 34 | 2587 |
| 1063250 | N/A | N/A | 4535 | 4550 | TCAGAAGCTGAATGGG | 36 | 2588 |
| 1063282 | N/A | N/A | 4707 | 4722 | GCTAAGAATTCTCCCC | 57 | 2589 |
| 1063314 | N/A | N/A | 5072 | 5087 | GCACTGGTGAGATGAG | N.D. | 2590 |
| 1063346 | N/A | N/A | 5192 | 5207 | TGAGGGAGATGAGTGT | 73 | 2591 |
| 1063378 | N/A | N/A | 5453 | 5468 | CTCAGATGCCGAGTTC | 51 | 2592 |
| 1063410 | N/A | N/A | 5646 | 5661 | CCACGCAAGACCTGCT | N.D. | 2593 |
| 1063442 | N/A | N/A | 5852 | 5867 | AGGCGAGTCCAGGAGT | 80 | 2594 |
| 1063474 | N/A | N/A | 6009 | 6024 | GACCGAGCTGACATTA | 76 | 2595 |
| 1063506 | N/A | N/A | 6123 | 6138 | GGTAGATTCTGAGACT | 54 | 2596 |
| 1063538 | N/A | N/A | 6273 | 6288 | AGTCCTATTTTGCCCC | 29 | 2597 |
| 1063570 | N/A | N/A | 6437 | 6452 | CACGCTAGCACAGCCC | 97 | 2598 |
| 1063602 | N/A | N/A | 6674 | 6689 | GGGAAAGGAGTCACAC | 84 | 2599 |
| 1063634 | N/A | N/A | 7151 | 7166 | CCTGAGACAGGGATTG | 55 | 2600 |
| 1063666 | N/A | N/A | 7371 | 7386 | AAGCCCACATGGTAGA | 65 | 2601 |
| 1063698 | N/A | N/A | 7798 | 7813 | GGTGTTACCAGGTGGG | 35 | 2602 |
| 1063730 | N/A | N/A | 7962 | 7977 | CTTTAAGGTTCTGCAC | 110 | 2603 |
| 1063762 | N/A | N/A | 8042 | 8057 | TAAAGACGGCCATTCG | 53 | 2604 |
| 1063793 | N/A | N/A | 8526 | 8541 | ACCCTAGACCTCTCCC | 44 | 2605 |
| 1063825 | N/A | N/A | 8823 | 8838 | ATTCTAGAGCCTGGCT | 92 | 2606 |
| 1063857 | N/A | N/A | 8910 | 8925 | GCCATCTAGAGGAGCT | 109 | 2607 |
| 1063889 | N/A | N/A | 9410 | 9425 | CTAAGTAGGGAGAAGA | 117 | 2608 |
| 1063921 | N/A | N/A | 9605 | 9620 | TCCTTTATACCAGCCC | 25 | 2609 |
| 1063953 | N/A | N/A | 9923 | 9938 | CTGGGCATGTTTGGAG | 60 | 2610 |
| 1063985 | N/A | N/A | 10452 | 10467 | TGGTTATGTGGCACCC | 39 | 2611 |
| 1064017 | N/A | N/A | 10723 | 10738 | TCTGAGGTGGAATCCC | 21 | 2612 |
| 1064049 | N/A | N/A | 11345 | 11360 | TCAGGATTAGGAGCTT | 47 | 2613 |
| 1064081 | N/A | N/A | 11535 | 11550 | CCCCAAGGGAGTCAGG | 73 | 2614 |
| 1064115 | N/A | N/A | 11619 | 11634 | CCTGGAATTACTTAGC | 57 | 2615 |
| 1064147 | N/A | N/A | 11686 | 11701 | CAGTGGATAGGTGAGC | 25 | 2616 |
| 1064179 | N/A | N/A | 11800 | 11815 | AAAGAAGCGGAGTAAC | 88 | 2617 |
| 1064211 | N/A | N/A | 11896 | 11911 | TCCACGGGCACAGGTA | 86 | 2618 |
| 1064243 | N/A | N/A | 11975 | 11990 | GGACCTCCTAGCTAGC | 54 | 2619 |
| 1064275 | N/A | N/A | 12196 | 12211 | ATGGAGGAACCCACTC | 87 | 2620 |
| 1064307 | N/A | N/A | 12381 | 12396 | AGGAGAGGGTTAGGTA | 68 | 2621 |
| 1064339 | N/A | N/A | 12569 | 12584 | GTGTTACAAGGAAAGG | 68 | 2622 |
| 1064371 | N/A | N/A | 12778 | 12793 | CAGCGATGATGATTGC | 60 | 2623 |
| 1064403 | N/A | N/A | 12921 | 12936 | TTATCGAGTATCTTAC | 101 | 2624 |
| 1064435 | N/A | N/A | 13165 | 13180 | AGTGAGGTGAAAGGTC | 72 | 2625 |
| 1064467 | N/A | N/A | 13384 | 13399 | CCTACCCCGAGCCATC | 69 | 2626 |

TABLE 39
Inhibition of Foxp3 mRNA by 3-10-3 cEt gapmers targeting
SEQ ID NO.: 1, and 2

| | SEQ ID | SEQ ID | SEQ ID | SEQ ID | | | |
|---|---|---|---|---|---|---|---|
| | NO: 1 | NO: 1 | NO: 2 | NO: 2 | | FOXP3 | SEQ |
| Compound | Start | Stop | Start | Stop | | (% | ID |
| Number | Site | Site | Site | Site | Sequence (5′ to 3′) | UTC) | NO |
| 911144 | N/A | N/A | 7355 | 7370 | TGCTATGATCATCCCC | 23 | 65 |
| 911179 | N/A | N/A | 10316 | 10331 | GCTTTAACAACTCAGG | 17 | 306 |
| 1062035 | 115 | 130 | 515 | 530 | GCTTGTGGGAAACTGT | 29 | 2627 |
| 1062067 | 302 | 317 | 6840 | 6855 | TCCCCCTGGGCCCCGG | 1 | 2628 |
| 1062099 | 412 | 427 | 7477 | 7492 | GCCACCATGACTAGGG | 154 | 2629 |
| 1062131 | 582 | 597 | 7745 | 7760 | CGGTGGTGGGTGGTGT | 106 | 2630 |
| 1062163 | 750 | 765 | 8396 | 8411 | GTGGGTAGGAGCTCTG | 58 | 2631 |
| 1062195 | 848 | 863 | 9438 | 9453 | ATCCAGAAGATGGTCC | 81 | 2632 |
| 1062227 | 1029 | 1044 | 11185 | 11200 | CAGCAGCTACGATGCA | 178 | 2633 |
| 1062259 | 1175 | 1190 | 12045 | 12060 | GTGGAACTTGAAGTAG | 8* | 2634 |
| 1062291 | 1418 | 1433 | 13828 | 13843 | CTTGCGGAACTCCAGC | 265 | 2635 |
| 1062323 | 1570 | 1585 | 13980 | 13995 | CCCTGTGGGCACATCC | 66 | 2636 |
| 1062355 | 1809 | 1824 | 14219 | 14234 | CAGCCCTGAAGTAATC | 190 | 2637 |
| 1062387 | 2019 | 2034 | 14429 | 14444 | CCTGTGTTGACAGTGC | 90 | 2638 |
| 1062419 | 2177 | 2192 | 14587 | 14602 | TGCACGGGACTCAAGA | 104 | 2639 |
| 1062483 | N/A | N/A | 13592 | 13607 | CACTTGAGGCCATCCC | 123 | 2640 |
| 1062515 | N/A | N/A | 13696 | 13711 | GTCAACCTCTGAGGCC | 123 | 2641 |
| 1062547 | N/A | N/A | 680 | 695 | TGGCTGGAATCACGGT | 134 | 2642 |
| 1062579 | N/A | N/A | 857 | 872 | CAAGTTGTTCAAAGCT | 91 | 2643 |
| 1062611 | N/A | N/A | 1094 | 1109 | GGTCAAGATGGAGGAG | 77 | 2644 |
| 1062643 | N/A | N/A | 1235 | 1250 | TGTAAAGGTCCTCGGC | 53 | 2645 |
| 1062676 | N/A | N/A | 1335 | 1350 | AGCGATACAAGCAAAG | 51 | 2646 |
| 1062708 | N/A | N/A | 1469 | 1484 | GAACAACCTGTTTGCT | 65 | 2647 |
| 1062740 | N/A | N/A | 1718 | 1733 | CACTTGGTCAAATCAA | 72 | 2648 |
| 1062772 | N/A | N/A | 1857 | 1872 | GAGAATTAGCAGAGAG | 37 | 2649 |
| 1062804 | N/A | N/A | 2072 | 2087 | ATTAGGAGTAAGGACA | 86 | 2650 |
| 1062836 | N/A | N/A | 2157 | 2172 | TATGTAATGGCTGATG | 53 | 2651 |
| 1062868 | N/A | N/A | 2364 | 2379 | CCATAAAAGAGACTAG | 93 | 2652 |
| 1062900 | N/A | N/A | 2548 | 2563 | CAAAGACTCCTGAGGA | 124 | 2653 |
| 1062932 | N/A | N/A | 2724 | 2739 | AGTCCATTATCCCAAC | 80 | 2654 |
| 1062964 | N/A | N/A | 2863 | 2878 | AGCTTGGACATGGACC | 162 | 2655 |
| 1062996 | N/A | N/A | 3064 | 3079 | AGAGGAGGATTGCCTC | 90 | 2656 |
| 1063028 | N/A | N/A | 3234 | 3249 | TGCAGGGCTTCAAGTT | 52 | 2657 |
| 1063060 | N/A | N/A | 3387 | 3402 | GATCTAGGCTTGGATT | 174 | 2658 |
| 1063092 | N/A | N/A | 3637 | 3652 | CCACGCTCTGGCCAAC | 113 | 2659 |
| 1063124 | N/A | N/A | 3861 | 3876 | AAATACATGGCCACTC | 93 | 2660 |
| 1063156 | N/A | N/A | 4081 | 4096 | GATTTAAAGGATCCTA | 70 | 2661 |
| 1063188 | N/A | N/A | 4215 | 4230 | CCCTTCTTGGGTTGTG | 77 | 2662 |
| 1063220 | N/A | N/A | 4397 | 4412 | CTTCATCGACACCACG | 92 | 2663 |
| 1063251 | N/A | N/A | 4548 | 4563 | CTGACTGGGTTTCTCA | 35 | 2664 |
| 1063283 | N/A | N/A | 4708 | 4723 | AGCTAAGAATTCTCCC | 67 | 2665 |
| 1063315 | N/A | N/A | 5073 | 5088 | AGCACTGGTGAGATGA | 43 | 2666 |
| 1063347 | N/A | N/A | 5255 | 5270 | GAGCAGTTGCTCCTTC | 174 | 2667 |
| 1063379 | N/A | N/A | 5454 | 5469 | GCTCAGATGCCGAGTT | 112 | 2668 |
| 1063411 | N/A | N/A | 5648 | 5663 | AGCCACGCAAGACCTG | 106 | 2669 |
| 1063443 | N/A | N/A | 5853 | 5868 | GAGGCGAGTCCAGGAG | 36 | 2670 |
| 1063475 | N/A | N/A | 6010 | 6025 | GGACCGAGCTGACATT | 68 | 2671 |
| 1063507 | N/A | N/A | 6127 | 6142 | AGTGGGTAGATTCTGA | 44 | 2672 |
| 1063539 | N/A | N/A | 6274 | 6289 | GAGTCCTATTTTGCCC | 68 | 2673 |
| 1063571 | N/A | N/A | 6438 | 6453 | CCACGCTAGCACAGCC | 222 | 2674 |
| 1063603 | N/A | N/A | 6964 | 6979 | GGTACCCCACCCTGCC | 86 | 2675 |
| 1063635 | N/A | N/A | 7169 | 7184 | AATACGGCCTCCTCCT | 217 | 2676 |
| 1063667 | N/A | N/A | 7372 | 7387 | CAAGCCCACATGGTAG | 61 | 2677 |
| 1063699 | N/A | N/A | 7799 | 7814 | AGGTGTTACCAGGTGG | 23 | 2678 |
| 1063731 | N/A | N/A | 7966 | 7981 | GCATCTTTAAGGTTCT | 6 | 2679 |
| 1063763 | N/A | N/A | 8043 | 8058 | TTAAAGACGGCCATTC | 266 | 2680 |
| 1063794 | N/A | N/A | 8557 | 8572 | TTATTGGGATGAAGCC | 21 | 2681 |
| 1063826 | N/A | N/A | 8842 | 8857 | GGGCAAAGCAGGAGTG | 126 | 2682 |
| 1063858 | N/A | N/A | 8911 | 8926 | AGCCATCTAGAGGAGC | 101 | 2683 |
| 1063890 | N/A | N/A | 9411 | 9426 | CCTAAGTAGGGAGAAG | 421 | 2684 |
| 1063922 | N/A | N/A | 9633 | 9648 | TTCCCTGGGAGTGCCC | 37 | 2685 |
| 1063954 | N/A | N/A | 9927 | 9942 | AGGTCTGGGCATGTTT | 27 | 2686 |
| 1063986 | N/A | N/A | 10453 | 10468 | GTGGTTATGTGGCACC | 61 | 2687 |
| 1064018 | N/A | N/A | 10742 | 10757 | GCCCTCTTCTAAATTC | 40 | 2688 |
| 1064050 | N/A | N/A | 11347 | 11362 | TGTCAGGATTAGGAGC | 67 | 2689 |
| 1064082 | N/A | N/A | 11541 | 11556 | CCCAATCCCCAAGGGA | 118 | 2690 |
| 1064116 | N/A | N/A | 11620 | 11635 | TCCTGGAATTACTTAG | 212 | 2691 |
| 1064148 | N/A | N/A | 11687 | 11702 | GCAGTGGATAGGTGAG | 20 | 2692 |
| 1064180 | N/A | N/A | 11801 | 11816 | AAAAGAAGCGGAGTAA | 270 | 2693 |
| 1064212 | N/A | N/A | 11897 | 11912 | GTCCACGGGCACAGGT | 124 | 2694 |
| 1064244 | N/A | N/A | 11976 | 11991 | AGGACCTCCTAGCTAG | 169 | 2695 |
| 1064276 | N/A | N/A | 12197 | 12212 | AATGGAGGAACCCACT | 118 | 2696 |
| 1064308 | N/A | N/A | 12382 | 12397 | CAGGAGAGGGTTAGGT | 79 | 2697 |
| 1064340 | N/A | N/A | 12576 | 12591 | CAAATGGGTGTTACAA | 234 | 2698 |
| 1064372 | N/A | N/A | 12779 | 12794 | TCAGCGATGATGATTG | 84 | 2699 |
| 1064404 | N/A | N/A | 12922 | 12937 | ATTATCGAGTATCTTA | 74 | 2700 |
| 1064436 | N/A | N/A | 13176 | 13191 | GCTAGGGCTGAAGTGA | 101 | 2701 |
| 1064468 | N/A | N/A | 13389 | 13404 | TATGACCTACCCCGAG | 131 | 2702 |

TABLE 40
Inhibition of Foxp3 mRNA by 3-10-3 cEt gapmers targeting
SEQ ID NO: 1, and 2

| | SEQ ID | SEQ ID | SEQ ID | SEQ ID | | | |
|---|---|---|---|---|---|---|---|
| | NO: 1 | NO: 1 | NO: 2 | NO: 2 | | FOXP3 | SEQ |
| Compound | Start | Stop | Start | Stop | | (% | ID |
| Number | Site | Site | Site | Site | Sequence (5′ to 3′) | UTC) | NO |
| 911144 | N/A | N/A | 7355 | 7370 | TGCTATGATCATCCCC | 30 | 65 |
| 911179 | N/A | N/A | 10316 | 10331 | GCTTTAACAACTCAGG | 21 | 306 |
| 1062036 | 117 | 132 | 517 | 532 | TGGCTTGTGGGAAACT | 36 | 2703 |
| 1062068 | 309 | 324 | 6847 | 6862 | GGAAGGTTCCCCCTGG | 44 | 2704 |
| 1062100 | 420 | 435 | 7485 | 7500 | CGGAGGGTGCCACCAT | 14 | 2705 |
| 1062132 | 591 | 606 | 7754 | 7769 | CCCCAGTGGCGGTGGT | 47 | 2706 |
| 1062164 | 751 | 766 | 8397 | 8412 | AGTGGGTAGGAGCTCT | 81 | 2707 |
| 1062196 | 857 | 872 | 9447 | 9462 | GCCCTTCTCATCCAGA | 52 | 2708 |
| 1062228 | 1047 | 1062 | 11203 | 11218 | CGACAGGGCCTTGGCT | 280 | 2709 |
| 1062260 | 1176 | 1191 | 12046 | 12061 | TGTGGAACTTGAAGTA | 33* | 2710 |
| 1062292 | 1421 | 1436 | 13831 | 13846 | TTTCTTGCGGAACTCC | 141 | 2711 |
| 1062324 | 1584 | 1599 | 13994 | 14009 | CCTCACTTCTTGGTCC | 51 | 2712 |
| 1062356 | 1847 | 1862 | 14257 | 14272 | ACAGGATTGTGACATT | 83 | 2713 |
| 1062388 | 2025 | 2040 | 14435 | 14450 | CACACCCCTGTGTTGA | 81 | 2714 |
| 1062420 | 2178 | 2193 | 14588 | 14603 | CTGCACGGGACTCAAG | 67 | 2715 |
| 1062484 | N/A | N/A | 13593 | 13608 | GCACTTGAGGCCATCC | 106 | 2716 |
| 1062516 | N/A | N/A | 13730 | 13745 | TCTGTGGAAGGCCGGG | 95 | 2717 |
| 1062548 | N/A | N/A | 681 | 696 | CTGGCTGGAATCACGG | 141 | 2718 |
| 1062580 | N/A | N/A | 863 | 878 | GCATTTCAAGTTGTTC | 5 | 2719 |
| 1062612 | N/A | N/A | 1107 | 1122 | ATCGATGGAGTGTGGT | 63 | 2720 |
| 1062644 | N/A | N/A | 1236 | 1251 | ATGTAAAGGTCCTCGG | 23 | 2721 |
| 1062677 | N/A | N/A | 1336 | 1351 | AAGCGATACAAGCAAA | 58 | 2722 |
| 1062709 | N/A | N/A | 1471 | 1486 | CTGAACAACCTGTTTG | 95 | 2723 |
| 1062741 | N/A | N/A | 1719 | 1734 | GCACTTGGTCAAATCA | 24 | 2724 |
| 1062773 | N/A | N/A | 1874 | 1889 | GGACAACCTTTTGGAA | 105 | 2725 |
| 1062805 | N/A | N/A | 2073 | 2088 | TATTAGGAGTAAGGAC | 70 | 2726 |
| 1062837 | N/A | N/A | 2158 | 2173 | ATATGTAATGGCTGAT | 18 | 2727 |
| 1062869 | N/A | N/A | 2365 | 2380 | GCCATAAAAGAGACTA | 58 | 2728 |
| 1062901 | N/A | N/A | 2554 | 2569 | TCTAAACAAAGACTCC | 81 | 2729 |
| 1062933 | N/A | N/A | 2729 | 2744 | TAGTCAGTCCATTATC | 42 | 2730 |
| 1062965 | N/A | N/A | 2864 | 2879 | AAGCTTGGACATGGAC | 70 | 2731 |
| 1062997 | N/A | N/A | 3066 | 3081 | CGAGAGGAGGATTGCC | 94 | 2732 |
| 1063029 | N/A | N/A | 3235 | 3250 | CTGCAGGGCTTCAAGT | 77 | 2733 |
| 1063061 | N/A | N/A | 3388 | 3403 | AGATCTAGGCTTGGAT | 142 | 2734 |
| 1063093 | N/A | N/A | 3639 | 3654 | CACCACGCTCTGGCCA | 96 | 2735 |
| 1063125 | N/A | N/A | 3862 | 3877 | CAAATACATGGCCACT | 87 | 2736 |
| 1063157 | N/A | N/A | 4084 | 4099 | TTAGATTTAAAGGATC | 78 | 2737 |
| 1063189 | N/A | N/A | 4218 | 4233 | TGGCCCTTCTTGGGTT | 99 | 2738 |
| 1063221 | N/A | N/A | 4401 | 4416 | CGGGCTTCATCGACAC | 36 | 2739 |
| 1063252 | N/A | N/A | 4553 | 4568 | CCTTTCTGACTGGGTT | 77 | 2740 |
| 1063284 | N/A | N/A | 4709 | 4724 | GAGCTAAGAATTCTCC | 97 | 2741 |
| 1063316 | N/A | N/A | 5074 | 5089 | GAGCACTGGTGAGATG | 43 | 2742 |
| 1063348 | N/A | N/A | 5273 | 5288 | TATAGAAGGGTTCTGG | 32 | 2743 |
| 1063380 | N/A | N/A | 5481 | 5496 | AGCCAACCCCATTATA | 116 | 2744 |
| 1063412 | N/A | N/A | 5653 | 5668 | GTCCAAGCCACGCAAG | 114 | 2745 |
| 1063444 | N/A | N/A | 5854 | 5869 | GGAGGCGAGTCCAGGA | 91 | 2746 |
| 1063476 | N/A | N/A | 6011 | 6026 | AGGACCGAGCTGACAT | 68 | 2747 |
| 1063508 | N/A | N/A | 6132 | 6147 | CGAGAAGTGGGTAGAT | 52 | 2748 |
| 1063540 | N/A | N/A | 6278 | 6293 | CTCGGAGTCCTATTTT | 100 | 2749 |
| 1063572 | N/A | N/A | 6440 | 6455 | GCCCACGCTAGCACAG | 69 | 2750 |
| 1063604 | N/A | N/A | 6965 | 6980 | AGGTACCCCACCCTGC | 96 | 2751 |
| 1063636 | N/A | N/A | 7170 | 7185 | CAATACGGCCTCCTCC | 83 | 2752 |
| 1063668 | N/A | N/A | 7374 | 7389 | TGCAAGCCCACATGGT | 148 | 2753 |
| 1063700 | N/A | N/A | 7800 | 7815 | GAGGTGTTACCAGGTG | 97 | 2754 |
| 1063732 | N/A | N/A | 7967 | 7982 | TGCATCTTTAAGGTTC | 28 | 2755 |
| 1063764 | N/A | N/A | 8044 | 8059 | CTTAAAGACGGCCATT | 206 | 2756 |
| 1063795 | N/A | N/A | 8558 | 8573 | CTTATTGGGATGAAGC | 221 | 2757 |
| 1063827 | N/A | N/A | 8847 | 8862 | TAGCAGGGCAAAGCAG | 107 | 2758 |
| 1063859 | N/A | N/A | 8915 | 8930 | CAGCAGCCATCTAGAG | 83 | 2759 |
| 1063891 | N/A | N/A | 9412 | 9427 | GCCTAAGTAGGGAGAA | 155 | 2760 |
| 1063923 | N/A | N/A | 9642 | 9657 | GCTACGGTCTTCCCTG | 61 | 2761 |
| 1063955 | N/A | N/A | 9938 | 9953 | GACAGATTTCCAGGTC | 94 | 2762 |
| 1063987 | N/A | N/A | 10460 | 10475 | GACCTATGTGGTTATG | 242 | 2763 |
| 1064019 | N/A | N/A | 10744 | 10759 | ACGCCCTCTTCTAAAT | 34 | 2764 |
| 1064051 | N/A | N/A | 11374 | 11389 | GCTCCTTTGCACCCTC | 55 | 2765 |
| 1064083 | N/A | N/A | 11546 | 11561 | ATGGCCCCAATCCCCA | 200 | 2766 |
| 1064117 | N/A | N/A | 11621 | 11636 | CTCCTGGAATTACTTA | 80 | 2767 |
| 1064149 | N/A | N/A | 11688 | 11703 | AGCAGTGGATAGGTGA | 62 | 2768 |
| 1064181 | N/A | N/A | 11802 | 11817 | GAAAAGAAGCGGAGTA | 53 | 2769 |
| 1064213 | N/A | N/A | 11907 | 11922 | CAACACCCGTGTCCAC | 93 | 2770 |
| 1064245 | N/A | N/A | 11977 | 11992 | CAGGACCTCCTAGCTA | 147 | 2771 |
| 1064277 | N/A | N/A | 12198 | 12213 | GAATGGAGGAACCCAC | 321 | 2772 |
| 1064309 | N/A | N/A | 12383 | 12398 | CCAGGAGAGGGTTAGG | 165 | 2773 |
| 1064341 | N/A | N/A | 12577 | 12592 | TCAAATGGGTGTTACA | 91 | 2774 |
| 1064373 | N/A | N/A | 12780 | 12795 | GTCAGCGATGATGATT | 306 | 2775 |
| 1064405 | N/A | N/A | 12923 | 12938 | AATTATCGAGTATCTT | 261 | 2776 |
| 1064437 | N/A | N/A | 13177 | 13192 | GGCTAGGGCTGAAGTG | 66 | 2777 |
| 1064469 | N/A | N/A | 13390 | 13405 | CTATGACCTACCCCGA | 214 | 2778 |

TABLE 41
Inhibition of Foxp3 mRNA by 3-10-3 cEt gapmers targeting
SEQ ID NO.: 1, and 2

| | SEQ ID | SEQ ID | SEQ ID | SEQ ID | | | |
|---|---|---|---|---|---|---|---|
| | NO: 1 | NO: 1 | NO: 2 | NO: 2 | | FOXP3 | SEQ |
| Compound | Start | Stop | Start | Stop | | (% | ID |
| Number | Site | Site | Site | Site | Sequence (5′ to 3′) | UTC) | NO |
| 678925 | N/A | N/A | 12902 | 12917 | TCAGGGACATGGTTAG | 75 | 2779 |
| 911144 | N/A | N/A | 7355 | 7370 | TGCTATGATCATCCCC | 33 | 65 |
| 1154721 | 84 | 99 | 484 | 499 | ACTTTGCTTTTATACC | 20 | 2780 |
| 1154727 | 336 | 351 | 6874 | 6889 | GGGCCCCGCCTCGAAG | 99 | 2781 |
| 1154733 | 1147 | 1162 | N/A | N/A | AGGAACTCTGGGAATG | 53 | 2782 |
| 1154739 | 1154 | 1169 | 12024 | 12039 | GTTGTGGAGGAACTCT | 54 | 2783 |
| 1154745 | 1255 | 1270 | 13485 | 13500 | TTGAGTGTCCGCTGCT | 16* | 2784 |
| 1154751 | 1914 | 1929 | 14324 | 14339 | AGCTTTGAGGTTGTTT | 30 | 2785 |
| 1154757 | 1931 | 1946 | 14341 | 14356 | TGATTGTGTGATGATG | 64 | 2786 |
| 1154763 | 2125 | 2140 | 14535 | 14550 | GATACACAGGTGAATT | 83 | 2787 |
| 1154769 | 2247 | 2262 | 14657 | 14672 | GGGAGTGAGGTGAGTG | 51 | 2788 |
| 1154775 | N/A | N/A | 621 | 636 | GCCGTGCCTACCTCCC | 40 | 2789 |
| 1154781 | N/A | N/A | 628 | 643 | CCCCCCCGCCGTGCCT | 66 | 2790 |
| 1154787 | N/A | N/A | 679 | 694 | GGCTGGAATCACGGTA | 64 | 2791 |
| 1154793 | N/A | N/A | 859 | 874 | TTCAAGTTGTTCAAAG | 47 | 2792 |
| 1154799 | N/A | N/A | 1106 | 1121 | TCGATGGAGTGTGGTC | 63 | 2793 |
| 1154805 | N/A | N/A | 1291 | 1306 | ACCTTGCAATCCTCCT | 43 | 2794 |
| 1154811 | N/A | N/A | 1379 | 1394 | GTGTGAAGTGCTCCCT | 31 | 2795 |
| 1154817 | N/A | N/A | 1572 | 1587 | ATTCTAATTTGGTTAC | 46 | 2796 |
| 1154823 | N/A | N/A | 1580 | 1595 | ATAGCATGATTCTAAT | 89 | 2797 |
| 1154829 | N/A | N/A | 1710 | 1725 | CAAATCAATCAAAGTT | 112 | 2798 |
| 1154835 | N/A | N/A | 1820 | 1835 | ACGCCCCCTTTGCCCC | 51 | 2799 |
| 1154841 | N/A | N/A | 1853 | 1868 | ATTAGCAGAGAGGGTC | 51 | 2800 |
| 1154847 | N/A | N/A | 2023 | 2038 | GCATGAATGGCCAATG | 73 | 2801 |
| 1154853 | N/A | N/A | 2155 | 2170 | TGTAATGGCTGATGAA | 28 | 2802 |
| 1154859 | N/A | N/A | 2511 | 2526 | AGTACATATGAGGAAA | 31 | 2803 |
| 1154865 | N/A | N/A | 2519 | 2534 | ACCATTGCAGTACATA | 17 | 2804 |
| 1154871 | N/A | N/A | 2622 | 2637 | AATGCTGATCTTGGGT | 59 | 2805 |
| 1154877 | N/A | N/A | 2800 | 2815 | GGAGGACCATGGAGTA | 101 | 2806 |
| 1154883 | N/A | N/A | 3037 | 3052 | TTTGCTGGTCTCTGGC | 34 | 2807 |
| 1154889 | N/A | N/A | 3218 | 3233 | GACAATTGCCCCTCTA | 54 | 2808 |
| 1154895 | N/A | N/A | 3266 | 3281 | TTCTACGCTGTCTGGT | 63 | 2809 |
| 1154901 | N/A | N/A | 3354 | 3369 | TTTCGGTGAGGCCCTG | 47 | 2810 |
| 1154907 | N/A | N/A | 3377 | 3392 | TGGATTTCAACTCTGC | 50 | 2811 |
| 1154913 | N/A | N/A | 3492 | 3507 | GGAATGGTAGCCCAGG | 54 | 2812 |
| 1154919 | N/A | N/A | 3657 | 3672 | CTGACATGCCTCCATC | 72 | 2813 |
| 1154925 | N/A | N/A | 3715 | 3730 | CCCACAATCAAGGTTT | 89 | 2814 |
| 1154931 | N/A | N/A | 4022 | 4037 | TCAGTATGTGTAGGCC | 29 | 2815 |
| 1154937 | N/A | N/A | 4247 | 4262 | ACTATGACAAGCCCCT | 63 | 2816 |
| 1154943 | N/A | N/A | 4453 | 4468 | CCCCGACTTGCCCAGA | 47 | 2817 |
| 1154949 | N/A | N/A | 4652 | 4667 | ACATTCTCAGACAGGG | 72 | 2818 |
| 1154955 | N/A | N/A | 4758 | 4773 | CATGTGGCTGGCCTGT | 92 | 2819 |
| 1154961 | N/A | N/A | 5158 | 5173 | TTCTTAGTCTCCTGGG | 40 | 2820 |
| 1154967 | N/A | N/A | 5539 | 5554 | CTTTTCAGGATCCTAT | 92 | 2821 |
| 1154973 | N/A | N/A | 5699 | 5714 | TGCTACACCCCCTGCC | 109 | 2822 |
| 1154979 | N/A | N/A | 5970 | 5985 | GAGTTGGATTGGGTGC | 52 | 2823 |
| 1154985 | N/A | N/A | 6043 | 6058 | AAGTGACATGGGTTTT | 58 | 2824 |
| 1154991 | N/A | N/A | 6070 | 6085 | GGATGTAGTGGGCAAG | 27 | 2825 |
| 1154997 | N/A | N/A | 6276 | 6291 | CGGAGTCCTATTTTGC | 90 | 2826 |
| 1155003 | N/A | N/A | 6562 | 6577 | CATAGTTGCACCCCAG | 202 | 2827 |
| 1155009 | N/A | N/A | 6648 | 6663 | GCGGTATGAGATACTC | 126 | 2828 |
| 1155015 | N/A | N/A | 7006 | 7021 | TCCCGCCCAGTGCCAC | 84 | 2829 |
| 1155021 | N/A | N/A | 7178 | 7193 | TGGGACTACAATACGG | 46 | 2830 |
| 1155027 | N/A | N/A | 7239 | 7254 | CCTACTTGGCCCCAGT | 61 | 2831 |
| 1155033 | N/A | N/A | 7315 | 7330 | CTCATGGAGATCGAGT | 92 | 2832 |
| 1155039 | N/A | N/A | 7398 | 7413 | GTGTCTAATTCAAATA | 97 | 2833 |
| 1155045 | N/A | N/A | 7903 | 7918 | GACACCTTTGACCCCC | 55 | 2834 |
| 1155051 | N/A | N/A | 7971 | 7986 | ATTCTGCATCTTTAAG | 68 | 2835 |
| 1155057 | N/A | N/A | 8002 | 8017 | TTGTAAAGCTCTGTGG | 27 | 2836 |
| 1155063 | N/A | N/A | 8050 | 8065 | GAGAAGCTTAAAGACG | 92 | 2837 |
| 1155069 | N/A | N/A | 8556 | 8571 | TATTGGGATGAAGCCT | 79 | 2838 |
| 1155075 | N/A | N/A | 8813 | 8828 | CTGGCTACATGGGTTC | 106 | 2839 |
| 1155081 | N/A | N/A | 9160 | 9175 | TGAGTTGAGAATGGGC | 76 | 2840 |
| 1155087 | N/A | N/A | 9420 | 9435 | CTGGCAGTGCCTAAGT | 106 | 2841 |
| 1155093 | N/A | N/A | 9602 | 9617 | TTTATACCAGCCCTCG | 82 | 2842 |
| 1155099 | N/A | N/A | 9875 | 9890 | GAATGTGAGGTTAGGT | 15 | 2843 |
| 1155105 | N/A | N/A | 10282 | 10297 | CTTAGAGTCAGAGGGT | 34 | 2844 |
| 1155111 | N/A | N/A | 10309 | 10324 | CAACTCAGGATCACAG | 32 | 2845 |
| 1155117 | N/A | N/A | 10415 | 10430 | TGGTCGCCATCTTGAA | 36 | 2846 |
| 1155123 | N/A | N/A | 10462 | 10477 | GTGACCTATGTGGTTA | 119 | 2847 |
| 1155129 | N/A | N/A | 10702 | 10717 | ACAGCATGAGCCGTAT | 93 | 2848 |
| 1155135 | N/A | N/A | 11570 | 11585 | GCTGGAGTCCAGAGTG | 81 | 2849 |
| 1155141 | N/A | N/A | 11808 | 11823 | GAGGTTGAAAAGAAGC | 53 | 2850 |
| 1155147 | N/A | N/A | 12338 | 12353 | GGTAGGTTTAGGGTCA | 80 | 2851 |
| 1155153 | N/A | N/A | 12568 | 12583 | TGTTACAAGGAAAGGT | 102 | 2852 |
| 1155159 | N/A | N/A | 12703 | 12718 | AATATCTGGTATCATG | 109 | 2853 |
| 1155165 | N/A | N/A | 12805 | 12820 | TTGGATTCAGGAATGG | 80 | 2854 |
| 1155176 | N/A | N/A | 13341 | 13356 | GGTAATCAGGGACAGG | 50 | 2855 |

TABLE 42
Inhibition of Foxp3 mRNA by 3-10-3 cEt gapmers targeting
SEQ ID NO.: 1, and 2

| | SEQ ID | SEQ ID | SEQ ID | SEQ ID | | | |
|---|---|---|---|---|---|---|---|
| | NO: 1 | NO: 1 | NO: 2 | NO: 2 | | FOXP3 | SEQ |
| Compound | Start | Stop | Start | Stop | | (% | ID |
| Number | Site | Site | Site | Site | Sequence (5′ to 3′) | UTC) | NO |
| 911144 | N/A | N/A | 7355 | 7370 | TGCTATGATCATCCCC | 26 | 65 |
| 1154723 | 112 | 127 | 512 | 527 | TGTGGGAAACTGTCAC | 84 | 2856 |
| 1154729 | 837 | 852 | 9427 | 9442 | GGTCCGCCTGGCAGTG | 41 | 2857 |
| 1154735 | 1149 | 1164 | N/A | N/A | GGAGGAACTCTGGGAA | 75 | 2858 |
| 1154741 | 1249 | 1264 | 13479 | 13494 | GTCCGCTGCTTCTCTG | 1* | 2859 |
| 1154747 | 1908 | 1923 | 14318 | 14333 | GAGGTTGTTTGAGTGT | 17 | 2860 |
| 1154753 | 1918 | 1933 | 14328 | 14343 | ATGCAGCTTTGAGGTT | N.D. | 2861 |
| 1154759 | 1933 | 1948 | 14343 | 14358 | TGTGATTGTGTGATGA | 27 | 2862 |
| 1154765 | 2127 | 2142 | 14537 | 14552 | GAGATACACAGGTGAA | 14 | 2863 |
| 1154771 | 2249 | 2264 | 14659 | 14674 | ATGGGAGTGAGGTGAG | 44 | 2864 |
| 1154777 | N/A | N/A | 623 | 638 | CCGCCGTGCCTACCTC | 63 | 2865 |
| 1154783 | N/A | N/A | 650 | 665 | CACTGTACCAGAGGGC | 72 | 2866 |
| 1154789 | N/A | N/A | 784 | 799 | TCAATTGATGAATTCA | 44 | 2867 |
| 1154795 | N/A | N/A | 862 | 877 | CATTTCAAGTTGTTCA | 30 | 2868 |
| 1154801 | N/A | N/A | 1193 | 1208 | GTGTACAAAGCTCTAG | 38 | 2869 |
| 1154807 | N/A | N/A | 1320 | 1335 | GTTCAGTTAAGTGCTC | 32 | 2870 |
| 1154813 | N/A | N/A | 1403 | 1418 | ACAGCTAAACTACGGT | 69 | 2871 |
| 1154819 | N/A | N/A | 1574 | 1589 | TGATTCTAATTTGGTT | 53 | 2872 |
| 1154825 | N/A | N/A | 1704 | 1719 | AATCAAAGTTCATGCT | 75 | 2873 |
| 1154831 | N/A | N/A | 1816 | 1831 | CCCCTTTGCCCCAGCA | 85 | 2874 |
| 1154837 | N/A | N/A | 1823 | 1838 | TGCACGCCCCCTTTGC | 103 | 2875 |
| 1154843 | N/A | N/A | 1876 | 1891 | TAGGACAACCTTTTGG | 39 | 2876 |
| 1154849 | N/A | N/A | 2071 | 2086 | TTAGGAGTAAGGACAT | 50 | 2877 |
| 1154855 | N/A | N/A | 2164 | 2179 | TGCTATATATGTAATG | 60 | 2878 |
| 1154861 | N/A | N/A | 2514 | 2529 | TGCAGTACATATGAGG | 24 | 2879 |
| 1154867 | N/A | N/A | 2614 | 2629 | TCTTGGGTTTATTGTG | 36 | 2880 |
| 1154873 | N/A | N/A | 2676 | 2691 | TCATCATATACCCTAA | 86 | 2881 |
| 1154879 | N/A | N/A | 2849 | 2864 | CCCACATATGGAGAGA | 75 | 2882 |
| 1154885 | N/A | N/A | 3039 | 3054 | CATTTGCTGGTCTCTG | 34 | 2883 |
| 1154891 | N/A | N/A | 3242 | 3257 | TAGGTGTCTGCAGGGC | 15 | 2884 |
| 1154897 | N/A | N/A | 3290 | 3305 | TGGAGTAGACAAGGGC | 36 | 2885 |
| 1154903 | N/A | N/A | 3371 | 3386 | TCAACTCTGCCGCTGC | 28 | 2886 |
| 1154909 | N/A | N/A | 3404 | 3419 | CCCACCTAGAGTCCTG | 72 | 2887 |
| 1154915 | N/A | N/A | 3653 | 3668 | CATGCCTCCATCATCA | 78 | 2888 |
| 1154921 | N/A | N/A | 3660 | 3675 | TGACTGACATGCCTCC | 65 | 2889 |
| 1154927 | N/A | N/A | 3800 | 3815 | CCTTTGGTCTGGGCCT | 37 | 2890 |
| 1154933 | N/A | N/A | 4035 | 4050 | CGGTCCCAAAGTCTCA | 43 | 2891 |
| 1154939 | N/A | N/A | 4269 | 4284 | GGTAGGTGATGTCCAT | 46 | 2892 |
| 1154945 | N/A | N/A | 4459 | 4474 | CACAGCCCCCGACTTG | 60 | 2893 |
| 1154951 | N/A | N/A | 4657 | 4672 | TAGATACATTCTCAGA | 58 | 2894 |
| 1154957 | N/A | N/A | 5096 | 5111 | GGCTCCGAACAAGGGC | 85 | 2895 |
| 1154963 | N/A | N/A | 5437 | 5452 | CGTAGTCCCATAGTGA | 74 | 2896 |
| 1154969 | N/A | N/A | 5600 | 5615 | ACAATGGCTCCGGGCC | 86 | 2897 |
| 1154975 | N/A | N/A | 5766 | 5781 | TGTAGAAGCTTCTCTA | 83 | 2898 |
| 1154981 | N/A | N/A | 6035 | 6050 | TGGGTTTTAGCTTGAG | 18 | 2899 |
| 1154987 | N/A | N/A | 6049 | 6064 | GAGTCAAAGTGACATG | 57 | 2900 |
| 1154993 | N/A | N/A | 6145 | 6160 | GCAGTGGAGAAGGCGA | 74 | 2901 |
| 1154999 | N/A | N/A | 6292 | 6307 | TCTCGGACTTTCTCCT | 63 | 2902 |
| 1155005 | N/A | N/A | 6617 | 6632 | GTGGACACTCCTCTGG | 85 | 2903 |
| 1155011 | N/A | N/A | 7001 | 7016 | CCCAGTGCCACAGTAA | 82 | 2904 |
| 1155017 | N/A | N/A | 7008 | 7023 | CCTCCCGCCCAGTGCC | 64 | 2905 |
| 1155023 | N/A | N/A | 7189 | 7204 | AGCTATGCTCATGGGA | 46 | 2906 |
| 1155029 | N/A | N/A | 7243 | 7258 | CTCACCTACTTGGCCC | 67 | 2907 |
| 1155035 | N/A | N/A | 7351 | 7366 | ATGATCATCCCCCTTT | 66 | 2908 |
| 1155041 | N/A | N/A | 7810 | 7825 | GGTACGGGCTGAGGTG | 50 | 2909 |
| 1155047 | N/A | N/A | 7942 | 7957 | CGTTTTTTGGAGGGTG | 13 | 2910 |
| 1155053 | N/A | N/A | 7996 | 8011 | AGCTCTGTGGTTTTGT | 31 | 2911 |
| 1155059 | N/A | N/A | 8004 | 8019 | CTTTGTAAAGCTCTGT | 32 | 2912 |
| 1155065 | N/A | N/A | 8052 | 8067 | CAGAGAAGCTTAAAGA | 96 | 2913 |
| 1155071 | N/A | N/A | 8663 | 8678 | GAGGTCGAGAGAAGCT | 95 | 2914 |
| 1155077 | N/A | N/A | 8880 | 8895 | AGTGGAATAAGGCTGG | 105 | 2915 |
| 1155083 | N/A | N/A | 9326 | 9341 | TGGGAGTTCTCTCCTC | 91 | 2916 |
| 1155089 | N/A | N/A | 9422 | 9437 | GCCTGGCAGTGCCTAA | 103 | 2917 |
| 1155095 | N/A | N/A | 9607 | 9622 | CTTCCTTTATACCAGC | 44 | 2918 |
| 1155101 | N/A | N/A | 9881 | 9896 | GGACCTGAATGTGAGG | 71 | 2919 |
| 1155107 | N/A | N/A | 10302 | 10317 | GGATCACAGTGTTTGG | 4 | 2920 |
| 1155113 | N/A | N/A | 10380 | 10395 | CAGGTTACATAGCTGG | 54 | 2921 |
| 1155119 | N/A | N/A | 10420 | 10435 | CTCTGTGGTCGCCATC | 15 | 2922 |
| 1155125 | N/A | N/A | 10550 | 10565 | TCTGTACATTCGCATC | 23 | 2923 |
| 1155131 | N/A | N/A | 11156 | 11171 | TCGGATGATGCCTGGG | 85 | 2924 |
| 1155137 | N/A | N/A | 11572 | 11587 | TAGCTGGAGTCCAGAG | 74 | 2925 |
| 1155143 | N/A | N/A | 11915 | 11930 | CTCACCGTCAACACCC | 97 | 2926 |
| 1155149 | N/A | N/A | 12400 | 12415 | TAGGCTATTTTATGGG | 85 | 2927 |
| 1155155 | N/A | N/A | 12580 | 12595 | GGATCAAATGGGTGTT | 67 | 2928 |
| 1155161 | N/A | N/A | 12731 | 12746 | CAGGGTTTCAGTTCAG | 46 | 2929 |
| 1155167 | N/A | N/A | 12888 | 12903 | AGGTGGTTAGGCTCAG | 66 | 2930 |
| 1155172 | N/A | N/A | 12959 | 12974 | TGACTTGGCTTTAGGT | 96 | 2931 |
| 1155178 | N/A | N/A | 13388 | 13403 | ATGACCTACCCCGAGC | 104 | 2932 |

TABLE 43
Inhibition of Foxp3 mRNA by 3-10-3 cEt gapmers targeting
SEQ ID NO.: 1, and 2

| | SEQ ID | SEQ ID | SEQ ID | SEQ ID | | | |
|---|---|---|---|---|---|---|---|
| | NO: 1 | NO: 1 | NO: 2 | NO: 2 | | FOXP3 | SEQ |
| Compound | Start | Stop | Start | Stop | | (% | ID |
| Number | Site | Site | Site | Site | Sequence (5′ to 3′) | UTC) | NO |
| 911144 | N/A | N/A | 7355 | 7370 | TGCTATGATCATCCCC | 24 | 65 |
| 1154724 | 144 | 159 | 544 | 559 | AAGTGGACTGACAGAA | 73 | 2933 |
| 1154730 | 838 | 853 | 9428 | 9443 | TGGTCCGCCTGGCAGT | 46 | 2934 |
| 1154736 | 1150 | 1165 | N/A | N/A | TGGAGGAACTCTGGGA | 85 | 2935 |
| 1154742 | 1250 | 1265 | 13480 | 13495 | TGTCCGCTGCTTCTCT | 8* | 2936 |
| 1154748 | 1909 | 1924 | 14319 | 14334 | TGAGGTTGTTTGAGTG | 35 | 2937 |
| 1154754 | 1928 | 1943 | 14338 | 14353 | TTGTGTGATGATGCAG | 4 | 2938 |
| 1154760 | 1935 | 1950 | 14345 | 14360 | TGTGTGATTGTGTGAT | 57 | 2939 |
| 1154766 | 2243 | 2258 | 14653 | 14668 | GTGAGGTGAGTGGCAG | 49 | 2940 |
| 1154772 | 2267 | 2282 | N/A | N/A | TGGATCAGGGCTCAGG | 34 | 2941 |
| 1154778 | N/A | N/A | 625 | 640 | CCCCGCCGTGCCTACC | 26 | 2942 |
| 1154784 | N/A | N/A | 656 | 671 | ACATCCCACTGTACCA | 78 | 2943 |
| 1154790 | N/A | N/A | 786 | 801 | TATCAATTGATGAATT | 134 | 2944 |
| 1154796 | N/A | N/A | 864 | 879 | AGCATTTCAAGTTGTT | 47 | 2945 |
| 1154802 | N/A | N/A | 1270 | 1285 | TAGGGTGAACAGAACT | 79 | 2946 |
| 1154808 | N/A | N/A | 1321 | 1336 | AGTTCAGTTAAGTGCT | 63 | 2947 |
| 1154814 | N/A | N/A | 1470 | 1485 | TGAACAACCTGTTTGC | 104 | 2948 |
| 1154820 | N/A | N/A | 1575 | 1590 | ATGATTCTAATTTGGT | 41 | 2949 |
| 1154826 | N/A | N/A | 1707 | 1722 | ATCAATCAAAGTTCAT | 47 | 2950 |
| 1154832 | N/A | N/A | 1817 | 1832 | CCCCCTTTGCCCCAGC | 47 | 2951 |
| 1154838 | N/A | N/A | 1824 | 1839 | ATGCACGCCCCCTTTG | 108 | 2952 |
| 1154844 | N/A | N/A | 1902 | 1917 | TTAGCTTAAGTAGAGG | 43 | 2953 |
| 1154850 | N/A | N/A | 2150 | 2165 | TGGCTGATGAAAGGTT | 48 | 2954 |
| 1154856 | N/A | N/A | 2165 | 2180 | TTGCTATATATGTAAT | 104 | 2955 |
| 1154862 | N/A | N/A | 2515 | 2530 | TTGCAGTACATATGAG | 77 | 2956 |
| 1154868 | N/A | N/A | 2617 | 2632 | TGATCTTGGGTTTATT | 58 | 2957 |
| 1154874 | N/A | N/A | 2789 | 2804 | GAGTATGGTTTAACAA | 63 | 2958 |
| 1154880 | N/A | N/A | 2906 | 2921 | CCCTGGTATAAGAACA | 112 | 2959 |
| 1154886 | N/A | N/A | 3044 | 3059 | AAGAACATTTGCTGGT | 44 | 2960 |
| 1154892 | N/A | N/A | 3243 | 3258 | TTAGGTGTCTGCAGGG | 69 | 2961 |
| 1154898 | N/A | N/A | 3291 | 3306 | GTGGAGTAGACAAGGG | 21 | 2962 |
| 1154904 | N/A | N/A | 3372 | 3387 | TTCAACTCTGCCGCTG | 48 | 2963 |
| 1154910 | N/A | N/A | 3411 | 3426 | CCAGGGTCCCACCTAG | 115 | 2964 |
| 1154916 | N/A | N/A | 3654 | 3669 | ACATGCCTCCATCATC | 70 | 2965 |
| 1154922 | N/A | N/A | 3661 | 3676 | CTGACTGACATGCCTC | 56 | 2966 |
| 1154928 | N/A | N/A | 4017 | 4032 | ATGTGTAGGCCAGTGT | 31 | 2967 |
| 1154934 | N/A | N/A | 4037 | 4052 | TACGGTCCCAAAGTCT | 97 | 2968 |
| 1154940 | N/A | N/A | 4270 | 4285 | TGGTAGGTGATGTCCA | 96 | 2969 |
| 1154946 | N/A | N/A | 4508 | 4523 | GGACACAGATTATGTT | 90 | 2970 |
| 1154952 | N/A | N/A | 4658 | 4673 | ATAGATACATTCTCAG | 50 | 2971 |
| 1154958 | N/A | N/A | 5097 | 5112 | AGGCTCCGAACAAGGG | 75 | 2972 |
| 1154964 | N/A | N/A | 5531 | 5546 | GATCCTATAATCCTGG | 96 | 2973 |
| 1154970 | N/A | N/A | 5601 | 5616 | CACAATGGCTCCGGGC | 74 | 2974 |
| 1154976 | N/A | N/A | 5914 | 5929 | AATATGTGAGTGGAGG | 68 | 2975 |
| 1154982 | N/A | N/A | 6038 | 6053 | ACATGGGTTTTAGCTT | 62 | 2976 |
| 1154988 | N/A | N/A | 6051 | 6066 | GAGAGTCAAAGTGACA | 74 | 2977 |
| 1154994 | N/A | N/A | 6189 | 6204 | AACAGTCCTGGCAAGT | 129 | 2978 |
| 1155000 | N/A | N/A | 6308 | 6323 | ATCTTGCCGGAGCTGG | 68 | 2979 |
| 1155006 | N/A | N/A | 6618 | 6633 | CGTGGACACTCCTCTG | 93 | 2980 |
| 1155012 | N/A | N/A | 7002 | 7017 | GCCCAGTGCCACAGTA | 104 | 2981 |
| 1155018 | N/A | N/A | 7009 | 7024 | CCCTCCCGCCCAGTGC | 67 | 2982 |
| 1155024 | N/A | N/A | 7190 | 7205 | TAGCTATGCTCATGGG | 47 | 2983 |
| 1155030 | N/A | N/A | 7304 | 7319 | CGAGTAACTTTTTAAA | 103 | 2984 |
| 1155036 | N/A | N/A | 7353 | 7368 | CTATGATCATCCCCCT | 64 | 2985 |
| 1155042 | N/A | N/A | 7885 | 7900 | AGTACTGCAATTCAGA | 57 | 2986 |
| 1155048 | N/A | N/A | 7965 | 7980 | CATCTTTAAGGTTCTG | 16 | 2987 |
| 1155054 | N/A | N/A | 7997 | 8012 | AAGCTCTGTGGTTTTG | 49 | 2988 |
| 1155060 | N/A | N/A | 8014 | 8029 | TTTTGACTAGCTTTGT | 45 | 2989 |
| 1155066 | N/A | N/A | 8053 | 8068 | GCAGAGAAGCTTAAAG | 79 | 2990 |
| 1155072 | N/A | N/A | 8664 | 8679 | TGAGGTCGAGAGAAGC | 121 | 2991 |
| 1155078 | N/A | N/A | 8883 | 8898 | AACAGTGGAATAAGGC | 65 | 2992 |
| 1155084 | N/A | N/A | 9329 | 9344 | CTCTGGGAGTTCTCTC | 85 | 2993 |
| 1155090 | N/A | N/A | 9423 | 9438 | CGCCTGGCAGTGCCTA | 89 | 2994 |
| 1155096 | N/A | N/A | 9608 | 9623 | CCTTCCTTTATACCAG | 102 | 2995 |
| 1155102 | N/A | N/A | 9954 | 9969 | TTTGTAAGTAGAAGGG | 32 | 2996 |
| 1155108 | N/A | N/A | 10303 | 10318 | AGGATCACAGTGTTTG | 18 | 2997 |
| 1155114 | N/A | N/A | 10412 | 10427 | TCGCCATCTTGAAATC | 57 | 2998 |
| 1155120 | N/A | N/A | 10421 | 10436 | GCTCTGTGGTCGCCAT | 34 | 2999 |
| 1155126 | N/A | N/A | 10584 | 10599 | GTCACCTAAACCCCCC | 54 | 3000 |
| 1155132 | N/A | N/A | 11322 | 11337 | CCGTGTAGTGCAAGGA | 106 | 3001 |
| 1155138 | N/A | N/A | 11574 | 11589 | AGTAGCTGGAGTCCAG | 42 | 3002 |
| 1155144 | N/A | N/A | 12285 | 12300 | TTGGATTTGCGGACAG | 57 | 3003 |
| 1155150 | N/A | N/A | 12550 | 12565 | GGAATGGTGCCCAGTT | 105 | 3004 |
| 1155156 | N/A | N/A | 12700 | 12715 | ATCTGGTATCATGTAG | 80 | 3005 |
| 1155162 | N/A | N/A | 12758 | 12773 | AGGCTATCAGTCAGGA | 74 | 3006 |
| 1155168 | N/A | N/A | 12894 | 12909 | ATGGTTAGGTGGTTAG | 92 | 3007 |
| 1155173 | N/A | N/A | 12966 | 12981 | GATGGGATGACTTGGC | 76 | 3008 |
| 1155179 | N/A | N/A | 13391 | 13406 | GCTATGACCTACCCCG | 96 | 3009 |

TABLE 44
Inhibition of Foxp3 mRNA by 3-10-3 cEt gapmers targeting
SEQ ID NO.: 1, and 2

| | SEQ ID | SEQ ID | SEQ ID | SEQ ID | | | |
|---|---|---|---|---|---|---|---|
| | NO: 1 | NO: 1 | NO: 2 | NO: 2 | | FOXP3 | SEQ |
| Compound | Start | Stop | Start | Stop | | (% | ID |
| Number | Site | Site | Site | Site | Sequence (5′ to 3′) | UTC | NO |
| 911144 | N/A | N/A | 7355 | 7370 | TGCTATGATCATCCCC | 30 | 65 |
| 1154725 | 152 | 167 | N/A | N/A | GCTTGGTGAAGTGGAC | 48 | 3010 |
| 1154731 | 839 | 854 | 9429 | 9444 | ATGGTCCGCCTGGCAG | 48 | 3011 |
| 1154737 | 1152 | 1167 | N/A | N/A | TGTGGAGGAACTCTGG | 74 | 3012 |
| 1154743 | 1252 | 1267 | 13482 | 13497 | AGTGTCCGCTGCTTCT | 7* | 3013 |
| 1154749 | 1911 | 1926 | 14321 | 14336 | TTTGAGGTTGTTTGAG | 40 | 3014 |
| 1154755 | 1929 | 1944 | 14339 | 14354 | ATTGTGTGATGATGCA | 38 | 3015 |
| 1154761 | 2066 | 2081 | 14476 | 14491 | ATCCTGAGGGTACTGA | 75 | 3016 |
| 1154767 | 2244 | 2259 | 14654 | 14669 | AGTGAGGTGAGTGGCA | 33 | 3017 |
| 1154773 | N/A | N/A | 619 | 634 | CGTGCCTACCTCCCTG | 48 | 3018 |
| 1154779 | N/A | N/A | 626 | 641 | CCCCCGCCGTGCCTAC | 33 | 3019 |
| 1154785 | N/A | N/A | 660 | 675 | GGGTACATCCCACTGT | 83 | 3020 |
| 1154791 | N/A | N/A | 787 | 802 | GTATCAATTGATGAAT | 100 | 3021 |
| 1154797 | N/A | N/A | 865 | 880 | CAGCATTTCAAGTTGT | 71 | 3022 |
| 1154803 | N/A | N/A | 1277 | 1292 | CTGCTACTAGGGTGAA | 22 | 3023 |
| 1154809 | N/A | N/A | 1322 | 1337 | AAGTTCAGTTAAGTGC | 38 | 3024 |
| 1154815 | N/A | N/A | 1523 | 1538 | TACTTTGTGCCAAACG | 62 | 3025 |
| 1154821 | N/A | N/A | 1578 | 1593 | AGCATGATTCTAATTT | 28 | 3026 |
| 1154827 | N/A | N/A | 1708 | 1723 | AATCAATCAAAGTTCA | 76 | 3027 |
| 1154833 | N/A | N/A | 1818 | 1833 | GCCCCCTTTGCCCCAG | 26 | 3028 |
| 1154839 | N/A | N/A | 1825 | 1840 | AATGCACGCCCCCTTT | 108 | 3029 |
| 1154845 | N/A | N/A | 1906 | 1921 | AGGGTTAGCTTAAGTA | 40 | 3030 |
| 1154851 | N/A | N/A | 2152 | 2167 | AATGGCTGATGAAAGG | 39 | 3031 |
| 1154857 | N/A | N/A | 2190 | 2205 | GCAAATGATGAATTGG | 34 | 3032 |
| 1154863 | N/A | N/A | 2516 | 2531 | ATTGCAGTACATATGA | 52 | 3033 |
| 1154869 | N/A | N/A | 2620 | 2635 | TGCTGATCTTGGGTTT | 33 | 3034 |
| 1154875 | N/A | N/A | 2792 | 2807 | ATGGAGTATGGTTTAA | 23 | 3035 |
| 1154881 | N/A | N/A | 2968 | 2983 | AGGGACACCCATGGCT | 87 | 3036 |
| 1154887 | N/A | N/A | 3045 | 3060 | TAAGAACATTTGCTGG | 33 | 3037 |
| 1154893 | N/A | N/A | 3250 | 3265 | TAAGTCATTAGGTGTC | 21 | 3038 |
| 1154899 | N/A | N/A | 3314 | 3329 | TTCTACACTGAGCACG | 49 | 3039 |
| 1154905 | N/A | N/A | 3373 | 3388 | TTTCAACTCTGCCGCT | 79 | 3040 |
| 1154911 | N/A | N/A | 3412 | 3427 | ACCAGGGTCCCACCTA | 112 | 3041 |
| 1154917 | N/A | N/A | 3655 | 3670 | GACATGCCTCCATCAT | 51 | 3042 |
| 1154923 | N/A | N/A | 3662 | 3677 | ACTGACTGACATGCCT | 55 | 3043 |
| 1154929 | N/A | N/A | 4018 | 4033 | TATGTGTAGGCCAGTG | 11 | 3044 |
| 1154935 | N/A | N/A | 4226 | 4241 | TGAAGACCTGGCCCTT | 90 | 3045 |
| 1154941 | N/A | N/A | 4273 | 4288 | ATGTGGTAGGTGATGT | 45 | 3046 |
| 1154947 | N/A | N/A | 4609 | 4624 | AGGACCTAGAGGGCCG | 122 | 3047 |
| 1154953 | N/A | N/A | 4663 | 4678 | AAAGCATAGATACATT | 69 | 3048 |
| 1154959 | N/A | N/A | 5098 | 5113 | GAGGCTCCGAACAAGG | 57 | 3049 |
| 1154965 | N/A | N/A | 5532 | 5547 | GGATCCTATAATCCTG | 114 | 3050 |
| 1154971 | N/A | N/A | 5603 | 5618 | TCCACAATGGCTCCGG | 72 | 3051 |
| 1154977 | N/A | N/A | 5944 | 5959 | GTGTAGATAGACATGA | 91 | 3052 |
| 1154983 | N/A | N/A | 6039 | 6054 | GACATGGGTTTTAGCT | 63 | 3053 |
| 1154989 | N/A | N/A | 6052 | 6067 | GGAGAGTCAAAGTGAC | 81 | 3054 |
| 1154995 | N/A | N/A | 6268 | 6283 | TATTTTGCCCCAGTGA | 60 | 3055 |
| 1155001 | N/A | N/A | 6396 | 6411 | GCAATGGTTGTTTCCC | 38 | 3056 |
| 1155007 | N/A | N/A | 6641 | 6656 | GAGATACTCGACCACC | 59 | 3057 |
| 1155013 | N/A | N/A | 7003 | 7018 | CGCCCAGTGCCACAGT | 78 | 3058 |
| 1155019 | N/A | N/A | 7092 | 7107 | GGATTTTCTTGGCCCT | 94 | 3059 |
| 1155025 | N/A | N/A | 7192 | 7207 | CATAGCTATGCTCATG | 99 | 3060 |
| 1155031 | N/A | N/A | 7313 | 7328 | CATGGAGATCGAGTAA | 25 | 3061 |
| 1155037 | N/A | N/A | 7358 | 7373 | AGATGCTATGATCATC | 114 | 3062 |
| 1155043 | N/A | N/A | 7900 | 7915 | ACCTTTGACCCCCAGA | 61 | 3063 |
| 1155049 | N/A | N/A | 7969 | 7984 | TCTGCATCTTTAAGGT | 89 | 3064 |
| 1155055 | N/A | N/A | 7998 | 8013 | AAAGCTCTGTGGTTTT | 57 | 3065 |
| 1155061 | N/A | N/A | 8016 | 8031 | CATTTTGACTAGCTTT | 48 | 3066 |
| 1155067 | N/A | N/A | 8192 | 8207 | ACAGGGCACCTATGGA | 85 | 3067 |
| 1155073 | N/A | N/A | 8691 | 8706 | CGTTTCTTATTATACA | 75 | 3068 |
| 1155079 | N/A | N/A | 8890 | 8905 | CTTTGGGAACAGTGGA | 83 | 3069 |
| 1155085 | N/A | N/A | 9331 | 9346 | CCCTCTGGGAGTTCTC | 99 | 3070 |
| 1155091 | N/A | N/A | 9424 | 9439 | CCGCCTGGCAGTGCCT | 41 | 3071 |
| 1155097 | N/A | N/A | 9609 | 9624 | TCCTTCCTTTATACCA | 71 | 3072 |
| 1155103 | N/A | N/A | 9959 | 9974 | GAGGGTTTGTAAGTAG | 94 | 3073 |
| 1155109 | N/A | N/A | 10304 | 10319 | CAGGATCACAGTGTTT | 12 | 3074 |
| 1155115 | N/A | N/A | 10413 | 10428 | GTCGCCATCTTGAAAT | 54 | 3075 |
| 1155121 | N/A | N/A | 10422 | 10437 | TGCTCTGTGGTCGCCA | 27 | 3076 |
| 1155127 | N/A | N/A | 10609 | 10624 | ACCACCCAACTGTGAC | 88 | 3077 |
| 1155133 | N/A | N/A | 11424 | 11439 | TGAGTGGCGGCAGCTG | 91 | 3078 |
| 1155139 | N/A | N/A | 11576 | 11591 | ATAGTAGCTGGAGTCC | 35 | 3079 |
| 1155145 | N/A | N/A | 12298 | 12313 | TGGTGGTTTAGGTTTG | 68 | 3080 |
| 1155151 | N/A | N/A | 12564 | 12579 | ACAAGGAAAGGTTGGG | 84 | 3081 |
| 1155157 | N/A | N/A | 12701 | 12716 | TATCTGGTATCATGTA | 110 | 3082 |
| 1155163 | N/A | N/A | 12759 | 12774 | GAGGCTATCAGTCAGG | 62 | 3083 |
| 1155169 | N/A | N/A | 12896 | 12911 | ACATGGTTAGGTGGTT | 93 | 3084 |
| 1155174 | N/A | N/A | 13278 | 13293 | GGTGAAGTGTCGGGTT | 58 | 3085 |
| 1155180 | N/A | N/A | 13392 | 13407 | GGCTATGACCTACCCC | N.D. | 3086 |

TABLE 45
Inhibition of Foxp3 mRNA by 3-10-3 cEt gapmers targeting
SEQ ID NO.: 1, and 2

| | SEQ ID | SEQ ID | SEQ ID | SEQ ID | | | |
|---|---|---|---|---|---|---|---|
| | NO: 1 | NO: 1 | NO: 2 | NO: 2 | | FOXP3 | SEQ |
| Compound | Start | Stop | Start | Stop | | (% | ID |
| Number | Site | Site | Site | Site | Sequence (5′ to 3′) | UTC) | NO |
| 911144 | N/A | N/A | 7355 | 7370 | TGCTATGATCATCCCC | 25 | 65 |
| 1154726 | 335 | 350 | 6873 | 6888 | GGCCCCGCCTCGAAGA | 62 | 3087 |
| 1154732 | 1146 | 1161 | N/A | N/A | GGAACTCTGGGAATGT | 40 | 3088 |
| 1154738 | 1153 | 1168 | 12023 | 12038 | TTGTGGAGGAACTCTG | 71 | 3089 |
| 1154744 | 1254 | 1269 | 13484 | 13499 | TGAGTGTCCGCTGCTT | 24* | 3090 |
| 1154750 | 1912 | 1927 | 14322 | 14337 | CTTTGAGGTTGTTTGA | 37 | 3091 |
| 1154756 | 1930 | 1945 | 14340 | 14355 | GATTGTGTGATGATGC | 25 | 3092 |
| 1154762 | 2067 | 2082 | 14477 | 14492 | GATCCTGAGGGTACTG | 55 | 3093 |
| 1154768 | 2246 | 2261 | 14656 | 14671 | GGAGTGAGGTGAGTGG | 41 | 3094 |
| 1154774 | N/A | N/A | 620 | 635 | CCGTGCCTACCTCCCT | 39 | 3095 |
| 1154780 | N/A | N/A | 627 | 642 | CCCCCCGCCGTGCCTA | 54 | 3096 |
| 1154786 | N/A | N/A | 662 | 677 | CTGGGTACATCCCACT | 98 | 3097 |
| 1154792 | N/A | N/A | 858 | 873 | TCAAGTTGTTCAAAGC | 37 | 3098 |
| 1154798 | N/A | N/A | 968 | 983 | GCAAGACAGGGTGAGC | 91 | 3099 |
| 1154804 | N/A | N/A | 1288 | 1303 | TTGCAATCCTCCTGCT | 95 | 3100 |
| 1154810 | N/A | N/A | 1323 | 1338 | AAAGTTCAGTTAAGTG | 60 | 3101 |
| 1154816 | N/A | N/A | 1562 | 1577 | GGTTACAGAAATACTA | 84 | 3102 |
| 1154822 | N/A | N/A | 1579 | 1594 | TAGCATGATTCTAATT | 66 | 3103 |
| 1154828 | N/A | N/A | 1709 | 1724 | AAATCAATCAAAGTTC | N.D. | 3104 |
| 1154834 | N/A | N/A | 1819 | 1834 | CGCCCCCTTTGCCCCA | 45 | 3105 |
| 1154840 | N/A | N/A | 1844 | 1859 | GAGGGTCATAAACTTT | 66 | 3106 |
| 1154846 | N/A | N/A | 1913 | 1928 | CTCACCTAGGGTTAGC | 76 | 3107 |
| 1154852 | N/A | N/A | 2153 | 2168 | TAATGGCTGATGAAAG | 80 | 3108 |
| 1154858 | N/A | N/A | 2247 | 2262 | GACTGTATAAAACCAT | 20 | 3109 |
| 1154864 | N/A | N/A | 2518 | 2533 | CCATTGCAGTACATAT | 27 | 3110 |
| 1154870 | N/A | N/A | 2621 | 2636 | ATGCTGATCTTGGGTT | 45 | 3111 |
| 1154876 | N/A | N/A | 2795 | 2810 | ACCATGGAGTATGGTT | 102 | 3112 |
| 1154882 | N/A | N/A | 3036 | 3051 | TTGCTGGTCTCTGGCT | 74 | 3113 |
| 1154888 | N/A | N/A | 3094 | 3109 | ATGCATGGAGAGCCAG | 91 | 3114 |
| 1154894 | N/A | N/A | 3263 | 3278 | TACGCTGTCTGGTTAA | 60 | 3115 |
| 1154900 | N/A | N/A | 3353 | 3368 | TTCGGTGAGGCCCTGA | 70 | 3116 |
| 1154906 | N/A | N/A | 3374 | 3389 | ATTTCAACTCTGCCGC | 46 | 3117 |
| 1154912 | N/A | N/A | 3490 | 3505 | AATGGTAGCCCAGGTT | 63 | 3118 |
| 1154918 | N/A | N/A | 3656 | 3671 | TGACATGCCTCCATCA | 75 | 3119 |
| 1154924 | N/A | N/A | 3712 | 3727 | ACAATCAAGGTTTTCG | 21 | 3120 |
| 1154930 | N/A | N/A | 4021 | 4036 | CAGTATGTGTAGGCCA | 11 | 3121 |
| 1154936 | N/A | N/A | 4231 | 4246 | AGCTCTGAAGACCTGG | 62 | 3122 |
| 1154942 | N/A | N/A | 4451 | 4466 | CCGACTTGCCCAGATT | 68 | 3123 |
| 1154948 | N/A | N/A | 4638 | 4653 | GGACATGGAGATGATC | 78 | 3124 |
| 1154954 | N/A | N/A | 4664 | 4679 | CAAAGCATAGATACAT | 66 | 3125 |
| 1154960 | N/A | N/A | 5104 | 5119 | TCTGTGGAGGCTCCGA | 72 | 3126 |
| 1154966 | N/A | N/A | 5535 | 5550 | TCAGGATCCTATAATC | 84 | 3127 |
| 1154972 | N/A | N/A | 5604 | 5619 | CTCCACAATGGCTCCG | 68 | 3128 |
| 1154978 | N/A | N/A | 5946 | 5961 | AGGTGTAGATAGACAT | 45 | 3129 |
| 1154984 | N/A | N/A | 6040 | 6055 | TGACATGGGTTTTAGC | 48 | 3130 |
| 1154990 | N/A | N/A | 6069 | 6084 | GATGTAGTGGGCAAGA | 55 | 3131 |
| 1154996 | N/A | N/A | 6275 | 6290 | GGAGTCCTATTTTGCC | 67 | 3132 |
| 1155002 | N/A | N/A | 6499 | 6514 | AGGTACATGTACATAC | 74 | 3133 |
| 1155008 | N/A | N/A | 6647 | 6662 | CGGTATGAGATACTCG | 79 | 3134 |
| 1155014 | N/A | N/A | 7004 | 7019 | CCGCCCAGTGCCACAG | 73 | 3135 |
| 1155020 | N/A | N/A | 7177 | 7192 | GGGACTACAATACGGC | 32 | 3136 |
| 1155026 | N/A | N/A | 7194 | 7209 | CACATAGCTATGCTCA | 38 | 3137 |
| 1155032 | N/A | N/A | 7314 | 7329 | TCATGGAGATCGAGTA | 16 | 3138 |
| 1155038 | N/A | N/A | 7359 | 7374 | TAGATGCTATGATCAT | 58 | 3139 |
| 1155044 | N/A | N/A | 7901 | 7916 | CACCTTTGACCCCCAG | 40 | 3140 |
| 1155050 | N/A | N/A | 7970 | 7985 | TTCTGCATCTTTAAGG | 59 | 3141 |
| 1155056 | N/A | N/A | 7999 | 8014 | TAAAGCTCTGTGGTTT | 86 | 3142 |
| 1155062 | N/A | N/A | 8022 | 8037 | TGCTGACATTTTGACT | 74 | 3143 |
| 1155068 | N/A | N/A | 8498 | 8513 | CCGGTAGACTGGCACA | 94 | 3144 |
| 1155074 | N/A | N/A | 8811 | 8826 | GGCTACATGGGTTCAA | 89 | 3145 |
| 1155080 | N/A | N/A | 9124 | 9139 | AAGCATTCTGGGTGGA | 53 | 3146 |
| 1155086 | N/A | N/A | 9389 | 9404 | TGCAGGTGACCACGAC | 74 | 3147 |
| 1155092 | N/A | N/A | 9552 | 9567 | CAGAAGGTTTTGCGCA | 50 | 3148 |
| 1155098 | N/A | N/A | 9874 | 9889 | AATGTGAGGTTAGGTT | 40 | 3149 |
| 1155104 | N/A | N/A | 10281 | 10296 | TTAGAGTCAGAGGGTT | 28 | 3150 |
| 1155110 | N/A | N/A | 10308 | 10323 | AACTCAGGATCACAGT | 79 | 3151 |
| 1155116 | N/A | N/A | 10414 | 10429 | GGTCGCCATCTTGAAA | 37 | 3152 |
| 1155122 | N/A | N/A | 10459 | 10474 | ACCTATGTGGTTATGT | 80 | 3153 |
| 1155128 | N/A | N/A | 10653 | 10668 | CCACTGATGCTGGGAC | 88 | 3154 |
| 1155134 | N/A | N/A | 11508 | 11523 | GACACTCGAGACCATA | 66 | 3155 |
| 1155140 | N/A | N/A | 11789 | 11804 | GTAACTTGCACACCAA | 62 | 3156 |
| 1155146 | N/A | N/A | 12304 | 12319 | CCTGGATGGTGGTTTA | 64 | 3157 |
| 1155152 | N/A | N/A | 12567 | 12582 | GTTACAAGGAAAGGTT | 103 | 3158 |
| 1155158 | N/A | N/A | 12702 | 12717 | ATATCTGGTATCATGT | 82 | 3159 |
| 1155164 | N/A | N/A | 12769 | 12784 | TGATTGCAGTGAGGCT | 102 | 3160 |
| 1155170 | N/A | N/A | 12900 | 12915 | AGGGACATGGTTAGGT | 66 | 3161 |
| 1155175 | N/A | N/A | 13340 | 13355 | GTAATCAGGGACAGGA | 107 | 3162 |
| 1155181 | N/A | N/A | 13421 | 13436 | GCACATTCCCCAAACT | 107 | 3163 |

TABLE 46
Inhibition of Foxp3 mRNA by 3-10-3 cEt gapmers targeting
SEQ ID NO.: 1, and 2

| | SEQ ID | SEQ ID | SEQ ID | SEQ ID | | | |
|---|---|---|---|---|---|---|---|
| | NO: 1 | NO: 1 | NO: 2 | NO: 2 | | FOXP3 | SEQ |
| Compound | Start | Stop | Start | Stop | | (% | ID |
| Number | Site | Site | Site | Site | Sequence (5′ to 3′) | UTC) | NO |
| 911144 | N/A | N/A | 7355 | 7370 | TGCTATGATCATCCCC | 27 | 65 |
| 1154722 | 85 | 100 | 485 | 500 | AACTTTGCTTTTATAC | N.D. | 3164 |
| 1154728 | 836 | 851 | 9426 | 9441 | GTCCGCCTGGCAGTGC | 51 | 3165 |
| 1154734 | 1148 | 1163 | N/A | N/A | GAGGAACTCTGGGAAT | 65 | 3166 |
| 1154740 | 1155 | 1170 | 12025 | 12040 | TGTTGTGGAGGAACTC | 83 | 3167 |
| 1154746 | 1905 | 1920 | 14315 | 14330 | GTTGTTTGAGTGTACT | 67 | 3168 |
| 1154752 | 1916 | 1931 | 14326 | 14341 | GCAGCTTTGAGGTTGT | 49 | 3169 |
| 1154758 | 1932 | 1947 | 14342 | 14357 | GTGATTGTGTGATGAT | 20 | 3170 |
| 1154764 | 2126 | 2141 | 14536 | 14551 | AGATACACAGGTGAAT | 48 | 3171 |
| 1154770 | 2248 | 2263 | 14658 | 14673 | TGGGAGTGAGGTGAGT | 57 | 3172 |
| 1154776 | N/A | N/A | 622 | 637 | CGCCGTGCCTACCTCC | 43 | 3173 |
| 1154782 | N/A | N/A | 649 | 664 | ACTGTACCAGAGGGCC | 77 | 3174 |
| 1154788 | N/A | N/A | 783 | 798 | CAATTGATGAATTCAT | 86 | 3175 |
| 1154794 | N/A | N/A | 861 | 876 | ATTTCAAGTTGTTCAA | 55 | 3176 |
| 1154800 | N/A | N/A | 1192 | 1207 | TGTACAAAGCTCTAGG | 32 | 3177 |
| 1154806 | N/A | N/A | 1313 | 1328 | TAAGTGCTCAGCTTGC | 71 | 3178 |
| 1154812 | N/A | N/A | 1385 | 1400 | ACAATGGTGTGAAGTG | 42 | 3179 |
| 1154818 | N/A | N/A | 1573 | 1588 | GATTCTAATTTGGTTA | 41 | 3180 |
| 1154824 | N/A | N/A | 1581 | 1596 | TATAGCATGATTCTAA | 67 | 3181 |
| 1154830 | N/A | N/A | 1729 | 1744 | CCAACAATCGGCACTT | 49 | 3182 |
| 1154836 | N/A | N/A | 1822 | 1837 | GCACGCCCCCTTTGCC | 46 | 3183 |
| 1154842 | N/A | N/A | 1872 | 1887 | ACAACCTTTTGGAAGG | 85 | 3184 |
| 1154848 | N/A | N/A | 2027 | 2042 | AAAAGCATGAATGGCC | 72 | 3185 |
| 1154854 | N/A | N/A | 2161 | 2176 | TATATATGTAATGGCT | 40 | 3186 |
| 1154860 | N/A | N/A | 2513 | 2528 | GCAGTACATATGAGGA | 21 | 3187 |
| 1154866 | N/A | N/A | 2531 | 2546 | GGTACTATTATAACCA | 97 | 3188 |
| 1154872 | N/A | N/A | 2637 | 2652 | TAAGTTTTAACACCTA | 69 | 3189 |
| 1154878 | N/A | N/A | 2837 | 2852 | GAGAACTGAATTTGTG | 22 | 3190 |
| 1154884 | N/A | N/A | 3038 | 3053 | ATTTGCTGGTCTCTGG | 8 | 3191 |
| 1154890 | N/A | N/A | 3225 | 3240 | TCAAGTTGACAATTGC | 54 | 3192 |
| 1154896 | N/A | N/A | 3289 | 3304 | GGAGTAGACAAGGGCC | 14 | 3193 |
| 1154902 | N/A | N/A | 3363 | 3378 | GCCGCTGCATTTCGGT | 74 | 3194 |
| 1154908 | N/A | N/A | 3378 | 3393 | TTGGATTTCAACTCTG | 44 | 3195 |
| 1154914 | N/A | N/A | 3613 | 3628 | CTGACCTATGGAGTCC | 73 | 3196 |
| 1154920 | N/A | N/A | 3659 | 3674 | GACTGACATGCCTCCA | 42 | 3197 |
| 1154926 | N/A | N/A | 3717 | 3732 | GCCCCACAATCAAGGT | 91 | 3198 |
| 1154932 | N/A | N/A | 4031 | 4046 | CCCAAAGTCTCAGTAT | 92 | 3199 |
| 1154938 | N/A | N/A | 4250 | 4265 | GCCACTATGACAAGCC | 71 | 3200 |
| 1154944 | N/A | N/A | 4458 | 4473 | ACAGCCCCCGACTTGC | 123 | 3201 |
| 1154950 | N/A | N/A | 4656 | 4671 | AGATACATTCTCAGAC | 49 | 3202 |
| 1154956 | N/A | N/A | 4785 | 4800 | GATGTTTTCCACCACT | 15 | 3203 |
| 1154962 | N/A | N/A | 5216 | 5231 | GGGTGGTTGTCAGAGC | 17 | 3204 |
| 1154968 | N/A | N/A | 5554 | 5569 | TGAGGGAAGCACTGGC | 42 | 3205 |
| 1154974 | N/A | N/A | 5700 | 5715 | ATGCTACACCCCCTGC | 74 | 3206 |
| 1154980 | N/A | N/A | 5971 | 5986 | GGAGTTGGATTGGGTG | 33 | 3207 |
| 1154986 | N/A | N/A | 6047 | 6062 | GTCAAAGTGACATGGG | 39 | 3208 |
| 1154992 | N/A | N/A | 6092 | 6107 | TCAGGAGCAGTGCTAG | 79 | 3209 |
| 1154998 | N/A | N/A | 6277 | 6292 | TCGGAGTCCTATTTTG | 63 | 3210 |
| 1155004 | N/A | N/A | 6607 | 6622 | CTCTGGTCAAAGCAGG | 74 | 3211 |
| 1155010 | N/A | N/A | 7000 | 7015 | CCAGTGCCACAGTAAA | 66 | 3212 |
| 1155016 | N/A | N/A | 7007 | 7022 | CTCCCGCCCAGTGCCA | 51 | 3213 |
| 1155022 | N/A | N/A | 7179 | 7194 | ATGGGACTACAATACG | 25 | 3214 |
| 1155028 | N/A | N/A | 7242 | 7257 | TCACCTACTTGGCCCC | 68 | 3215 |
| 1155034 | N/A | N/A | 7350 | 7365 | TGATCATCCCCCTTTT | 70 | 3216 |
| 1155040 | N/A | N/A | 7633 | 7648 | CTGTGGTTCAGCCTGA | 64 | 3217 |
| 1155046 | N/A | N/A | 7929 | 7944 | GTGGAGTTTCCAAGCC | 40 | 3218 |
| 1155052 | N/A | N/A | 7995 | 8010 | GCTCTGTGGTTTTGTG | 19 | 3219 |
| 1155058 | N/A | N/A | 8003 | 8018 | TTTGTAAAGCTCTGTG | 22 | 3220 |
| 1155064 | N/A | N/A | 8051 | 8066 | AGAGAAGCTTAAAGAC | 73 | 3221 |
| 1155070 | N/A | N/A | 8569 | 8584 | GCATCTTACTACTTAT | 24 | 3222 |
| 1155076 | N/A | N/A | 8827 | 8842 | GCAGATTCTAGAGCCT | 57 | 3223 |
| 1155082 | N/A | N/A | 9175 | 9190 | ATGTTGGAAGTGTGGT | 69 | 3224 |
| 1155088 | N/A | N/A | 9421 | 9436 | CCTGGCAGTGCCTAAG | 79 | 3225 |
| 1155094 | N/A | N/A | 9606 | 9621 | TTCCTTTATACCAGCC | 62 | 3226 |
| 1155100 | N/A | N/A | 9876 | 9891 | TGAATGTGAGGTTAGG | 6 | 3227 |
| 1155106 | N/A | N/A | 10286 | 10301 | GGATCTTAGAGTCAGA | 20 | 3228 |
| 1155112 | N/A | N/A | 10372 | 10387 | ATAGCTGGTCCTGCTG | 105 | 3229 |
| 1155118 | N/A | N/A | 10417 | 10432 | TGTGGTCGCCATCTTG | 23 | 3230 |
| 1155124 | N/A | N/A | 10549 | 10564 | CTGTACATTCGCATCA | 35 | 3231 |
| 1155130 | N/A | N/A | 10720 | 10735 | GAGGTGGAATCCCACA | 83 | 3232 |
| 1155136 | N/A | N/A | 11571 | 11586 | AGCTGGAGTCCAGAGT | 45 | 3233 |
| 1155142 | N/A | N/A | 11839 | 11854 | TTGCACCACTTCTGCC | 83 | 3234 |
| 1155148 | N/A | N/A | 12397 | 12412 | GCTATTTTATGGGTCC | 19 | 3235 |
| 1155154 | N/A | N/A | 12574 | 12589 | AATGGGTGTTACAAGG | 57 | 3236 |
| 1155160 | N/A | N/A | 12705 | 12720 | GGAATATCTGGTATCA | 70 | 3237 |
| 1155166 | N/A | N/A | 12886 | 12901 | GTGGTTAGGCTCAGGG | 51 | 3238 |
| 1155171 | N/A | N/A | 12930 | 12945 | TGGTTTGAATTATCGA | 37 | 3239 |
| 1155177 | N/A | N/A | 13345 | 13360 | GGCAGGTAATCAGGGA | 51 | 3240 |

TABLE 47
Inhibition of Foxp3 mRNA by 3-10-3 cEt gapmers targeting
SEQ ID NO.: 3, 4 and 5

| | SEQ ID | SEQ ID | SEQ ID | SEQ ID | SEQ ID | SEQ ID | | | |
|---|---|---|---|---|---|---|---|---|---|
| | NO: 3 | NO: 3 | NO: 4 | NO: 4 | NO: 5 | NO: 5 | | FOXP3 | SEQ |
| Compound | Start | Stop | Start | Stop | Start | Stop | | (% | ID |
| Number | Site | Site | Site | Site | Site | Site | Sequence (5′ to 3′) | UTC) | NO |
| 1062517 | N/A | N/A | N/A | N/A | 11 | 26 | GGCGAGGCTCCT | 92 | 626 |
| | | | | | | | GAGA | | |
| 911066 | 395 | 410 | N/A | N/A | 162 | 177 | CACCGTTGAGA | 54 | 3241 |
| | | | | | | | GCTGC | | |
| 1062518 | N/A | N/A | N/A | N/A | 12 | 27 | GGGCGAGGCTC | 75 | 3242 |
| | | | | | | | CTGAG | | |
| 1063075 | N/A | N/A | 11215 | 11230 | N/A | N/A | TAAACTGAGGC | 74 | 3243 |
| | | | | | | | CTGCA | | |
| 1062451 | 393 | 408 | N/A | N/A | 160 | 175 | CCGTTGAGAGCT | 53 | 3244 |
| | | | | | | | GCAG | | |
| 1062452 | 394 | 409 | N/A | N/A | 161 | 176 | ACCGTTGAGAG | 82 | 3245 |
| | | | | | | | CTGCA | | |
| 1062519 | N/A | N/A | N/A | N/A | 13 | 28 | TGGGCGAGGCT | 98 | 3246 |
| | | | | | | | CCTGA | | |

### Example 3: Dose-Dependent Inhibition of Human Foxp3 in LNCaP Cells by cEt Gapmers

[0403] Modified oligonucleotides described in the studies above were tested at various doses in LNCaP cells. Cultured LNCaP cells at a density of 30,000 cells per well were transfected using electroporation with modified oligonucleotides diluted to concentrations of 8,000 nM, 4,000 nM, 500 nM and 125 nM for 24 hours. After 24 hours, Foxp3 mRNA levels were measured as previously described using the Human Foxp3 primer-probe set RTS35925. Foxp3 mRNA levels were adjusted according to total RNA content, as measured by RIBOGREEN®. Results are presented in the tables below as percent control of the amount of Foxp3 mRNA relative to untreated control cells (% UTC). IC50s were calculated using a linear regression on a log/linear plot of the data in excel.

TABLE 48
Dose-dependent inhibition of human Foxp3 mRNA expression
by modified oligonucleotides in LNCaP cells

| | % UTC | | | | |
|---|---|---|---|---|---|
| ION | 125 | 500 | 2000 | 8000 | IC₅₀ |
| NO. | nM | nM | nM | nM | (μM) |
| 911180 | 87 | 45 | 15 | 2 | 0.5 |
| 911032 | 74 | 63 | 28 | 9 | 0.7 |
| 910969 | 91 | 75 | 24 | 11 | 0.9 |
| 911120 | 73 | 57 | 19 | 15 | 0.5 |
| 911152 | 99 | 70 | 29 | 15 | 0.9 |
| 910965 | 112 | 70 | 34 | 22 | 1.1 |
| 911144 | 56 | 47 | 23 | 8 | 0.3 |
| 911028 | 99 | 67 | 36 | 22 | 1.1 |
| 911012 | 85 | 53 | 17 | 5 | 0.5 |
| 910926 | 75 | 58 | 32 | 14 | 0.7 |
| 910958 | 98 | 66 | 35 | 18 | 1.0 |
| 911093 | 83 | 76 | 33 | 16 | 1.1 |
| 911105 | 100 | 72 | 39 | 16 | 1.3 |
| 911133 | 75 | 41 | 27 | 10 | 0.4 |
| 911101 | 100 | 48 | 26 | 16 | 0.7 |
| 910930 | 89 | 58 | 25 | 4 | 0.7 |
| 910962 | 90 | 47 | 35 | 24 | 0.7 |
| 910997 | 105 | 52 | 27 | 19 | 0.7 |
| 911110 | 101 | 54 | 23 | 10 | 0.7 |

TABLE 49
Dose-dependent inhibition of human Foxp3 mRNA
expression by modified oligonucleotides in LNCaP cells

| | % UTC | | | | |
|---|---|---|---|---|---|
| ION | 125 | 500 | 2000 | 8000 | IC₅₀ |
| NO. | nM | nM | nM | nM | (μM) |
| 911098 | 80 | 53 | 24 | 8 | 0.6 |
| 911118 | 73 | 53 | 28 | 3 | 0.5 |
| 911014 | 104 | 53 | 26 | 16 | 0.7 |
| 911162 | 94 | 66 | 17 | 11 | 0.7 |
| 911182 | 103 | 70 | 27 | 10 | 0.9 |
| 910959 | 94 | 52 | 20 | 9 | 0.6 |
| 910955 | 59 | 64 | 39 | 13 | 0.9 |
| 911194 | 79 | 44 | 19 | 5 | 0.4 |
| 911023 | 92 | 69 | 30 | 14 | 0.9 |
| 910956 | 74 | 47 | 19 | 6 | 0.4 |
| 911179 | 106 | 55 | 21 | 8 | 0.7 |
| 911171 | 76 | 59 | 21 | 11 | 0.6 |
| 911011 | 116 | 58 | 30 | 11 | 0.9 |
| 910924 | 88 | 66 | 30 | 12 | 0.9 |
| 911019 | 76 | 52 | 24 | 6 | 0.5 |
| 911051 | 99 | 75 | 33 | 14 | 1.1 |
| 910980 | 67 | 41 | 33 | 10 | 0.4 |
| 911183 | 113 | 75 | 43 | 23 | 1.5 |
| 911180 | 105 | 46 | 30 | 7 | 0.7 |

### Example 4: Dose-Dependent Inhibition of Human Foxp3 in SUP-M2 Cells by cEt Gapmers

[0404] Modified oligonucleotides described in the studies above were tested at various doses in SUP-M2 cells. ION No. 141923 (5-10-5 MOE gapmer, CCTTCCCTGAAGGTTCCTCC, designated herein as SEQ ID NO: 3247), a control modified oligonucleotide that does not target Foxp3, has been included in each experiment as a negative control.

[0405] Cultured SUP-M2 cells at a density of 60,000 cells per well were treated using free uptake with modified oligonucleotides diluted to concentrations of 7,000 nM, 1,750 nM, 437.5 nM and 109.375 nM for 24 hours. After 24 hours, Foxp3 mRNA levels were measured as previously described using the Human Foxp3 primer-probe set RTS35925. Foxp3 mRNA levels were adjusted according to total RNA content, as measured by RIBOGREEN®. Results are presented in the tables below as percent control of the amount of Foxp3 mRNA relative to untreated control cells (% UTC). IC50s were calculated using a linear regression on a log/linear plot of the data in excel. The modified oligonucleotides with percent control values marked with an asterisk (*) target the amplicon region of the primer probe set. Additional assays may be used to measure the potency and efficacy of the modified oligonucleotides targeting the amplicon region.

TABLE 50
Dose-dependent inhibition of human Foxp3 mRNA expression
by free uptake of modified oligonucleotides in SUP-M2 cells

| | % UTC | | | | |
|---|---|---|---|---|---|
| ION | 109.375 | 437.5 | 1750.0 | 7000.0 | IC₅₀ |
| No. | nM | nM | nM | nM | (μM) |
| 910956 | 82 | 73 | 39 | 26 | 1.2 |
| 911144 | 74 | 81 | 47 | 11 | 1.1 |
| 911179 | 75 | 44 | 19 | 10 | 0.4 |
| 1062005 | 121 | 75 | 19 | 6 | 1.1 |
| 1062006 | 97 | 65 | 41 | 15 | 1.1 |
| 1062166 | 99 | 127 | 109 | 94 | >7.0 |
| 1062422 | 114 | 104 | 75 | 51 | >7.0 |
| 1062645 | 148 | 93 | 49 | 17 | 2.0 |
| 1062838 | 137 | 88 | 28 | 11 | 1.4 |
| 1062839 | 72 | 82 | 54 | 20 | 1.5 |
| 1062903 | 108 | 47 | 9 | 7 | 0.7 |
| 1063062 | 123 | 78 | 36 | 18 | 1.5 |
| 1063063 | 98 | 63 | 21 | 14 | 0.8 |
| 1063094 | 150 | 126 | 78 | 60 | >7.0 |
| 1063158 | 138 | 97 | 66 | 43 | 4.3 |
| 1063159 | 71 | 90 | 66 | 23 | 2.4 |
| 1063542 | 103 | 107 | 101 | 88 | >7.0 |
| 1063734 | 73 | 45 | 11 | 5 | 0.3 |
| 1063988 | 130 | 119 | 60 | 26 | 3.1 |

TABLE 51
Dose-dependent inhibition of human Foxp3 mRNA expression
by free uptake of modified oligonucleotides in SUP-M2 cells

| | % UTC | | | | |
|---|---|---|---|---|---|
| ION | 109.375 | 437.5 | 1750.0 | 7000.0 | IC₅₀ |
| No. | nM | nM | nM | nM | (μM) |
| 911144 | 112 | 68 | 42 | 12 | 1.3 |
| 1062008 | 69 | 30 | 10 | 3 | 0.2 |
| 1062009 | 80 | 40 | 18 | 5 | 0.4 |
| 1062393 | 71 | 42 | 42 | 14 | 0.5 |
| 1062425 | 58 | 23 | 5 | 2 | <0.1 |
| 1062937 | 75 | 44 | 37 | 18 | 0.5 |
| 1062938 | 62 | 41 | 21 | 5 | 0.2 |
| 1063033 | 64 | 48 | 24 | 15 | 0.3 |
| 1063097 | 79 | 43 | 23 | 12 | 0.5 |
| 1063320 | 67 | 46 | 22 | 14 | 0.3 |
| 1063353 | 81 | 52 | 54 | 52 | >7.0 |
| 1063736 | 83 | 60 | 41 | 15 | 0.9 |
| 1063768 | 65 | 64 | 20 | 19 | 0.5 |
| 1063769 | 66 | 24 | 5 | 1 | 0.2 |
| 1063895 | 74 | 44 | 34 | 11 | 0.5 |
| 1063959 | 114 | 93 | 49 | 23 | 2.1 |
| 1063960 | 73 | 35 | 19 | 9 | 0.3 |
| 1064121 | 78 | 51 | 34 | 14 | 0.6 |
| 1064122 | 82 | 61 | 41 | 13 | 0.8 |

TABLE 52
Dose-dependent inhibition of human Foxp3 mRNA expression
by free uptake of modified oligonucleotides in SUP-M2 cells

| | % UTC | | | | |
|---|---|---|---|---|---|
| ION | 109.375 | 437.5 | 1750.0 | 7000.0 | IC₅₀ |
| No. | nM | nM | nM | nM | (μM) |
| 911144 | 44 | 43 | 36 | 11 | <0.1 |
| 1062010 | 64 | 28 | 10 | 3 | 0.2 |
| 1062268 | 13* | 19* | 9* | 3* | <0.1* |
| 1062299 | 112 | 140 | 148 | 103 | >7.0 |
| 1062331 | 138 | 93 | 113 | 59 | >7.0 |
| 1062395 | 80 | 41 | 16 | 4 | 0.4 |
| 1062426 | 101 | 57 | 27 | 13 | 0.8 |
| 1062427 | 139 | 133 | 54 | 13 | 2.5 |
| 1062907 | 103 | 57 | 17 | 6 | 0.7 |
| 1062908 | 142 | 75 | 43 | 13 | 1.6 |
| 1063035 | 86 | 50 | 27 | 9 | 0.6 |
| 1063036 | 160 | 102 | 46 | 8 | 1.9 |
| 1063037 | 40 | 27 | 35 | 19 | <0.1 |
| 1063067 | 118 | 84 | 37 | 21 | 1.6 |
| 1063099 | 70 | 67 | 49 | 23 | 1.1 |
| 1063163 | 117 | 62 | 35 | 13 | 1.2 |
| 1063164 | 129 | 112 | 68 | 25 | 3.2 |
| 1063962 | 153 | 129 | 69 | 33 | 4.0 |
| 1064091 | 36 | 37 | 51 | 27 | <0.1 |

TABLE 53
Dose-dependent inhibition of human Foxp3 mRNA expression
by free uptake of modified oligonucleotides in SUP-M2 cells

| | % UTC | | | | |
|---|---|---|---|---|---|
| ION | 109.375 | 437.5 | 1750.0 | 7000.0 | IC₅₀ |
| No. | nM | nM | nM | nM | (μM) |
| 911144 | 61 | 48 | 29 | 12 | 0.3 |
| 1062007 | 102 | 35 | 25 | 6 | 0.6 |
| 1062044 | 53 | 37 | 21 | 13 | 0.1 |
| 1062263 | 113* | 72* | 30* | 6* | 1.1* |
| 1062396 | 47 | 44 | 34 | 23 | <0.1 |
| 1062428 | 59 | 37 | 19 | 14 | 0.2 |
| 1062712 | 67 | 78 | 42 | 18 | 0.9 |
| 1062840 | 102 | 41 | 37 | 7 | 0.7 |
| 1062904 | 60 | 86 | 32 | 26 | 0.9 |
| 1062909 | 47 | 44 | 22 | 13 | <0.1 |
| 1063032 | 85 | 41 | 11 | 3 | 0.4 |
| 1063101 | 49 | 35 | 22 | 8 | <0.1 |
| 1063197 | 51 | 47 | 31 | 14 | 0.2 |
| 1063319 | 47 | 42 | 62 | 54 | 0.6 |
| 1063324 | 86 | 43 | 26 | 13 | 0.6 |
| 1063511 | 89 | 53 | 50 | 14 | 0.9 |
| 1063735 | 86 | 27 | 34 | 12 | 0.4 |
| 1063963 | 49 | 33 | 18 | 7 | <0.1 |
| 1064312 | 56 | 42 | 50 | 33 | 0.3 |

TABLE 54
Dose-dependent inhibition of human Foxp3 mRNA expression
by free uptake of modified oligonucleotides in SUP-M2 cells

| | % UTC | | | | |
|---|---|---|---|---|---|
| ION | 109.375 | 437.5 | 1750.0 | 7000.0 | IC₅₀ |
| No. | nM | nM | nM | nM | (μM) |
| 911144 | 80 | 51 | 41 | 14 | 0.7 |
| 1062015 | 76 | 66 | 41 | 39 | 1.6 |
| 1062047 | 86 | 68 | 46 | 16 | 1.1 |
| 1062206 | 88 | 87 | 92 | 87 | >7.0 |
| 1062335 | 86 | 68 | 63 | 28 | 2.1 |
| 1062336 | 91 | 73 | 36 | 18 | 1.1 |
| 1062367 | 90 | 61 | 36 | 11 | 0.9 |
| 1062368 | 68 | 29 | 9 | 7 | 0.2 |
| 1062431 | 66 | 54 | 45 | 30 | 0.7 |
| 1062560 | 97 | 63 | 40 | 21 | 1.2 |
| 1062753 | 77 | 71 | 41 | 39 | 1.7 |
| 1063648 | 115 | 69 | 29 | 11 | 1.1 |
| 1063649 | 71 | 35 | 14 | 1 | 0.3 |
| 1063743 | 110 | 81 | 43 | 17 | 1.5 |
| 1063744 | 82 | 47 | 10 | 4 | 0.4 |
| 1063967 | 90 | 90 | 88 | 80 | >7.0 |
| 1064094 | 71 | 59 | 37 | 21 | 0.7 |
| 1064095 | 94 | 78 | 40 | 12 | 1.2 |
| 1064161 | 80 | 71 | 67 | 36 | 3.4 |

TABLE 55
Dose-dependent inhibition of human Foxp3 mRNA expression
by free uptake of modified oligonucleotides in SUP-M2 cells

| | % UTC | | | | |
|---|---|---|---|---|---|
| ION | 109.375 | 437.5 | 1750.0 | 7000.0 | IC₅₀ |
| No. | nM | nM | nM | nM | (μM) |
| 911144 | 39 | 22 | 21 | 7 | <0.1 |
| 1062372 | 83 | 51 | 23 | 11 | 0.6 |
| 1062596 | 44 | 44 | 63 | 42 | 4.3 |
| 1062660 | 43 | 31 | 62 | 58 | 1.1 |
| 1062724 | 51 | 19 | 7 | 2 | <0.1 |
| 1062725 | 101 | 80 | 31 | 14 | 1.2 |
| 1062885 | 93 | 41 | 48 | 15 | 0.8 |
| 1062979 | 116 | 39 | 25 | 14 | 0.8 |
| 1063203 | 95 | 54 | 25 | 20 | 0.8 |
| 1063234 | 71 | 78 | 27 | 17 | 0.8 |
| 1063268 | 55 | 36 | 22 | 7 | 0.1 |
| 1063331 | 52 | 23 | 10 | 3 | <0.1 |
| 1063332 | 104 | 75 | 34 | 16 | 1.2 |
| 1063394 | 86 | 69 | 38 | 22 | 1.1 |
| 1063491 | 49 | 18 | 9 | 4 | <0.1 |
| 1063587 | 88 | 87 | 59 | 40 | 3.9 |
| 1063619 | 39 | 20 | 17 | 9 | <0.1 |
| 1063651 | 101 | 71 | 38 | 18 | 1.2 |
| 1063652 | 75 | 61 | 25 | 12 | 0.6 |

TABLE 56
Dose-dependent inhibition of human Foxp3 mRNA expression
by free uptake of modified oligonucleotides in SUP-M2 cells

| | % UTC | | | | |
|---|---|---|---|---|---|
| ION | 109.375 | 437.5 | 1750.0 | 7000.0 | IC₅₀ |
| No. | nM | nM | nM | nM | (μM) |
| 911144 | 81 | 54 | 35 | 9 | 0.6 |
| 1062087 | 51 | 30 | 23 | 8 | <0.1 |
| 1062247 | 66 | 52 | 27 | 21 | 0.4 |
| 1062375 | 51 | 26 | 14 | 5 | <0.1 |
| 1062376 | 102 | 67 | 39 | 15 | 1.1 |
| 1062439 | 103 | 48 | 26 | 18 | 0.8 |
| 1062504 | 188 | 173 | 105 | 57 | >7.0 |
| 1062536 | 100 | 97 | 81 | 19 | 3.2 |
| 1062760 | 59 | 29 | 17 | 18 | 0.1 |
| 1062761 | 136 | 103 | 39 | 49 | 3.4 |
| 1062857 | 57 | 65 | 37 | 24 | 0.6 |
| 1063049 | 134 | 117 | 57 | 24 | 2.8 |
| 1063145 | 141 | 103 | 28 | 21 | 1.8 |
| 1063399 | 93 | 109 | 33 | 21 | 1.7 |
| 1063400 | 106 | 54 | 77 | 22 | 2.1 |
| 1063912 | 75 | 48 | 40 | 26 | 0.7 |
| 1063975 | 110 | 100 | 39 | 18 | 1.7 |
| 1063976 | 51 | 33 | 16 | 6 | <0.1 |
| 1064103 | 72 | 48 | 24 | 22 | 0.4 |

TABLE 57
Dose-dependent inhibition of human Foxp3 mRNA expression
by free uptake of modified oligonucleotides in SUP-M2 cells

| | % UTC | | | | |
|---|---|---|---|---|---|
| ION | 109.375 | 437.5 | 1750.0 | 7000.0 | IC₅₀ |
| No. | nM | nM | nM | nM | (μM) |
| 911144 | 86 | 55 | 26 | 8 | 0.6 |
| 1062030 | 110 | 45 | 12 | 3 | 0.7 |
| 1062125 | 156 | 149 | 93 | 67 | >7.0 |
| 1062349 | 154 | 91 | 41 | 21 | 2.0 |
| 1062382 | 72 | 57 | 20 | 10 | 0.5 |
| 1062446 | 120 | 106 | 100 | 48 | >7.0 |
| 1062542 | 94 | 98 | 79 | 28 | 4.3 |
| 1062670 | 115 | 68 | 42 | 45 | 2.5 |
| 1062991 | 108 | 41 | 40 | 18 | 1.0 |
| 1063055 | 98 | 83 | 57 | 39 | 3.3 |
| 1063310 | 116 | 100 | 51 | 25 | 2.4 |
| 1063437 | 188 | 147 | 88 | 85 | >7.0 |
| 1063757 | 121 | 114 | 62 | 74 | >7.0 |
| 1063917 | 109 | 87 | 30 | 20 | 1.4 |
| 1063948 | 111 | 97 | 36 | 11 | 1.5 |
| 1063981 | 122 | 57 | 22 | 4 | 0.9 |
| 1064012 | 184 | 159 | 122 | 82 | >7.0 |
| 1064111 | 115 | 140 | 86 | 52 | >7.0 |
| 1064303 | 114 | 98 | 74 | 48 | >7.0 |

TABLE 58
Dose-dependent inhibition of human Foxp3 mRNA expression
by free uptake of modified oligonucleotides in SUP-M2 cells

| | % UTC | | | | |
|---|---|---|---|---|---|
| ION | 109.375 | 437.5 | 1750.0 | 7000.0 | IC₅₀ |
| No. | nM | nM | nM | nM | (μM) |
| 911144 | 114 | 70 | 22 | 9 | 1.0 |
| 1062094 | 36 | 71 | 65 | 50 | <0.1 |
| 1062383 | 76 | 71 | 54 | 23 | 1.4 |
| 1062384 | 57 | 45 | 23 | 9 | 0.2 |
| 1062447 | 85 | 96 | 62 | 35 | 3.8 |
| 1062448 | 99 | 91 | 33 | 15 | 1.4 |
| 1062543 | 64 | 57 | 23 | 9 | 0.4 |
| 1062737 | 93 | 56 | 24 | 11 | 0.7 |
| 1062802 | 92 | 48 | 21 | 8 | 0.6 |
| 1062832 | 79 | 84 | 43 | 11 | 1.1 |
| 1062833 | 93 | 75 | 30 | 12 | 1.0 |
| 1063058 | 82 | 35 | 25 | 5 | 0.4 |
| 1063247 | 70 | 55 | 40 | 11 | 0.6 |
| 1063248 | 59 | 39 | 26 | 5 | 0.2 |
| 1063822 | 78 | 77 | 80 | 57 | >7.0 |
| 1063982 | 90 | 81 | 37 | 16 | 1.2 |
| 1064047 | 112 | 86 | 51 | 20 | 1.9 |
| 1064113 | 57 | 74 | 31 | 15 | 0.5 |
| 1064145 | 100 | 73 | 43 | 13 | 1.2 |

TABLE 59
Dose-dependent inhibition of human Foxp3 mRNA expression
by free uptake of modified oligonucleotides in SUP-M2 cells

| | % UTC | | | | |
|---|---|---|---|---|---|
| ION | 109.375 | 437.5 | 1750.0 | 7000.0 | IC₅₀ |
| No. | nM | nM | nM | nM | (μM) |
| 911144 | 76 | 69 | 34 | 14 | 0.8 |
| 1062035 | 91 | 57 | 32 | 18 | 0.9 |
| 1062067 | 71 | 36 | 15 | 9 | 0.3 |
| 1062100 | 120 | 132 | 106 | 69 | >7.0 |
| 1062132 | 109 | 68 | 83 | 68 | >7.0 |
| 1062580 | 96 | 35 | 9 | 0 | 0.5 |
| 1062644 | 140 | 77 | 35 | 5 | 1.4 |
| 1062741 | 109 | 71 | 35 | 11 | 1.2 |
| 1062837 | 128 | 65 | 41 | 14 | 1.4 |
| 1062933 | 109 | 75 | 46 | 26 | 1.8 |
| 1063348 | 97 | 86 | 41 | 15 | 1.4 |
| 1063410 | 86 | 88 | 58 | 49 | 6.3 |
| 1063699 | 89 | 66 | 44 | 15 | 1.0 |
| 1063731 | 70 | 27 | 8 | 3 | 0.2 |
| 1063732 | 75 | 45 | 29 | 7 | 0.4 |
| 1063794 | 88 | 116 | 122 | 93 | >7.0 |
| 1063954 | 90 | 64 | 19 | 4 | 0.7 |
| 1064019 | 74 | 73 | 45 | 31 | 1.4 |
| 1064148 | 102 | 54 | 31 | 15 | 0.9 |

TABLE 60
Dose-dependent inhibition of human Foxp3 mRNA
expression by free uptake of modified oligonucleotides in
SUP-M2 cells

| | % UTC | | | | |
|---|---|---|---|---|---|
| ION | 109.375 | 437.5 | 1750.0 | 7000.0 | IC₅₀ |
| No. | nM | nM | nM | nM | (μM) |
| 911144 | 88 | 71 | 29 | 11 | 0.9 |
| 1062078 | 123 | 118 | 110 | 88 | >7.0 |
| 1062334 | 93 | 68 | 40 | 12 | 1.0 |
| 1062365 | 60 | 26 | 9 | 2 | 0.1 |
| 1062366 | 98 | 60 | 22 | 6 | 0.7 |
| 1062397 | 70 | 46 | 25 | 9 | 0.4 |
| 1062783 | 83 | 72 | 34 | 13 | 0.9 |
| 1063038 | 77 | 34 | 17 | 5 | 0.3 |
| 1063039 | 96 | 76 | 55 | 35 | 2.6 |
| 1063326 | 114 | 89 | 48 | 21 | 1.9 |
| 1063646 | 93 | 75 | 59 | 39 | 3.2 |
| 1063774 | 87 | 86 | 61 | 37 | 3.6 |
| 1063804 | 79 | 58 | 37 | 15 | 0.7 |
| 1063901 | 125 | 92 | 81 | 55 | >7.0 |
| 1063964 | 83 | 92 | 49 | 21 | 1.8 |
| 1064060 | 117 | 85 | 55 | 35 | 2.8 |
| 1064120 | 85 | 85 | 58 | 46 | 5.0 |
| 1064184 | 96 | 72 | 33 | 19 | 1.1 |
| 1064191 | 85 | 79 | 52 | 20 | 1.5 |

TABLE 61
Dose-dependent inhibition of human Foxp3 mRNA
expression by free uptake of modified oligonucleotides in
SUP-M2 cells

| | % UTC | | | | |
|---|---|---|---|---|---|
| ION | 109.375 | 437.5 | 1750.0 | 7000.0 | IC₅₀ |
| No. | nM | nM | nM | nM | (μM) |
| 911144 | 100 | 62 | 25 | 5 | 0.8 |
| 1062017 | 96 | 82 | 48 | 27 | 1.9 |
| 1062305 | 67 | 57 | 36 | 16 | 0.5 |
| 1062369 | 92 | 52 | 29 | 10 | 0.7 |
| 1062529 | 33 | 14 | 13 | 9 | <0.1 |
| 1062561 | 98 | 85 | 71 | 37 | 4.4 |
| 1062562 | 139 | 94 | 45 | 22 | 2.1 |
| 1062722 | 90 | 60 | 29 | 8 | 0.7 |
| 1062723 | 104 | 103 | 48 | 16 | 1.9 |
| 1062754 | 88 | 78 | 77 | 38 | 5.5 |
| 1063074 | 83 | 74 | 60 | 22 | 1.8 |
| 1063329 | 77 | 31 | 12 | 4 | 0.3 |
| 1063330 | 60 | 37 | 15 | 4 | 0.2 |
| 1063553 | 75 | 64 | 39 | 19 | 0.8 |
| 1063650 | 119 | 40 | 10 | 2 | 0.7 |
| 1063745 | 73 | 46 | 14 | 3 | 0.4 |
| 1063905 | 109 | 89 | 31 | 6 | 1.2 |
| 1064064 | 75 | 79 | 35 | 21 | 1.0 |
| 1064096 | 65 | 35 | 9 | 3 | 0.2 |

TABLE 62
Dose-dependent inhibition of human Foxp3 mRNA
expression by free uptake of modified oligonucleotides in
SUP-M2 cells

| | % UTC | | | | |
|---|---|---|---|---|---|
| ION | 109.375 | 437.5 | 1750.0 | 7000.0 | IC₅₀ |
| No. | nM | nM | nM | nM | (μM) |
| 911144 | 108 | 91 | 31 | 12 | 1.3 |
| 1062021 | 60 | 47 | 29 | 12 | 0.3 |
| 1062086 | 64 | 40 | 20 | 11 | 0.2 |
| 1062310 | 84 | 54 | 24 | 11 | 0.6 |
| 1062373 | 52 | 37 | 4 | 2 | 0.1 |
| 1062407 | 93 | 52 | 25 | 13 | 0.7 |
| 1062437 | 89 | 64 | 48 | 18 | 1.2 |
| 1062470 | 93 | 78 | 37 | 2 | 1.0 |
| 1062566 | 86 | 58 | 22 | 7 | 0.6 |
| 1062823 | 114 | 98 | 76 | 35 | 4.6 |
| 1063207 | 83 | 77 | 32 | 6 | 0.9 |
| 1063237 | 32 | 22 | 18 | 11 | <0.1 |
| 1063238 | 33 | 25 | 16 | 9 | <0.1 |
| 1063333 | 71 | 44 | 23 | 10 | 0.4 |
| 1063429 | 78 | 63 | 48 | 28 | 1.2 |
| 1063653 | 79 | 36 | 15 | 4 | 0.3 |
| 1063654 | 88 | 61 | 60 | 12 | 1.2 |
| 1063655 | 99 | 60 | 29 | 8 | 0.8 |
| 1063910 | 93 | 57 | 18 | 6 | 0.6 |

TABLE 63
Dose-dependent inhibition of human Foxp3 mRNA
expression by free uptake of modified oligonucleotides in
SUP-M2 cells

| | % UTC | | | | |
|---|---|---|---|---|---|
| ION | 109.375 | 437.5 | 1750.0 | 7000.0 | IC₅₀ |
| No. | nM | nM | nM | nM | (μM) |
| 911144 | 100 | 80 | 29 | 7 | 1.0 |
| 1062377 | 95 | 101 | 51 | 23 | 2.2 |
| 1062378 | 65 | 45 | 24 | 6 | 0.3 |
| 1062410 | 117 | 80 | 50 | 53 | 4.1 |
| 1062441 | 90 | 71 | 60 | 48 | 5.2 |
| 1062570 | 79 | 50 | 26 | 9 | 0.5 |
| 1062633 | 104 | 77 | 67 | 42 | 4.2 |
| 1062699 | 106 | 70 | 37 | 19 | 1.3 |
| 1062890 | 81 | 64 | 47 | 30 | 1.4 |
| 1062891 | 68 | 35 | 15 | 6 | 0.2 |
| 1063082 | 83 | 101 | 73 | 63 | >7.0 |
| 1063146 | 89 | 77 | 50 | 52 | 4.7 |
| 1063178 | 79 | 71 | 43 | 15 | 1.0 |
| 1063529 | 98 | 90 | 76 | 50 | >7.0 |
| 1063658 | 96 | 61 | 30 | 12 | 0.9 |
| 1063721 | 74 | 77 | 53 | 28 | 1.7 |
| 1063946 | 91 | 37 | 10 | 3 | 0.4 |
| 1064008 | 84 | 68 | 34 | 18 | 0.9 |
| 1064203 | 97 | 85 | 37 | 21 | 1.5 |

TABLE 64
Dose-dependent inhibition of human Foxp3 mRNA
expression by free uptake of modified oligonucleotides in
SUP-M2 cells

| | % UTC | | | | |
|---|---|---|---|---|---|
| ION | 109.375 | 437.5 | 1750.0 | 7000.0 | IC₅₀ |
| No. | nM | nM | nM | nM | (μM) |
| 911144 | 94 | 53 | 24 | 5 | 0.7 |
| 1062028 | 34 | 26 | 3 | 1 | <0.1 |
| 1062029 | 46 | 26 | 3 | 0 | <0.1 |
| 1062347 | 95 | 137 | 107 | 82 | >7.0 |
| 1062348 | 66 | 51 | 35 | 13 | 0.4 |
| 1062379 | 88 | 56 | 23 | 6 | 0.6 |
| 1062413 | 74 | 24 | 19 | 4 | 0.2 |
| 1062667 | 76 | 65 | 24 | 8 | 0.6 |
| 1062668 | 93 | 29 | 11 | 3 | 0.4 |
| 1062669 | 81 | 45 | 14 | 3 | 0.4 |
| 1062700 | 69 | 50 | 32 | 12 | 0.5 |
| 1062861 | 76 | 77 | 44 | 31 | 1.6 |
| 1062894 | 94 | 57 | 31 | 11 | 0.8 |
| 1062989 | 82 | 44 | 11 | 3 | 0.4 |
| 1063054 | 106 | 90 | 55 | 15 | 1.8 |
| 1063818 | 110 | 112 | 99 | 109 | >7.0 |
| 1063915 | 94 | 73 | 33 | 10 | 1.0 |
| 1063947 | 66 | 36 | 5 | 3 | 0.2 |
| 1063980 | 71 | 35 | 9 | 1 | 0.3 |

TABLE 65
Dose-dependent inhibition of human Foxp3 mRNA
expression by free uptake of modified oligonucleotides in
SUP-M2 cells

| | % UTC | | | | |
|---|---|---|---|---|---|
| ION | 109.375 | 437.5 | 1750.0 | 7000.0 | IC₅₀ |
| No. | nM | nM | nM | nM | (μM) |
| 911144 | 98 | 58 | 12 | 22 | 0.8 |
| 1062034 | 75 | 56 | 20 | 8 | 0.5 |
| 1062322 | 107 | 73 | 29 | 13 | 1.1 |
| 1062385 | 93 | 56 | 18 | 5 | 0.6 |
| 1062386 | 74 | 51 | 22 | 14 | 0.5 |
| 1062481 | 56 | 67 | 42 | 27 | 0.7 |
| 1062545 | 99 | 90 | 49 | 14 | 1.6 |
| 1062641 | 96 | 59 | 27 | 7 | 0.8 |
| 1062739 | 92 | 59 | 28 | 7 | 0.7 |
| 1062771 | 73 | 57 | 27 | 6 | 0.5 |
| 1062803 | 92 | 59 | 33 | 16 | 0.9 |
| 1062834 | 117 | 55 | 14 | 7 | 0.8 |
| 1062835 | 80 | 53 | 18 | 12 | 0.5 |
| 1063314 | 141 | 56 | 18 | 5 | 1.0 |
| 1063538 | 38 | 29 | 15 | 5 | <0.1 |
| 1063921 | 77 | 41 | 19 | 5 | 0.4 |
| 1063984 | 78 | 35 | 21 | 5 | 0.3 |
| 1064017 | 96 | 61 | 31 | 12 | 0.9 |
| 1064147 | 99 | 74 | 38 | 11 | 1.1 |

### Example 5: Dose-Dependent Inhibition of Human Foxp3 in SUP-M2 Cells by cEt Gapmers

[0406] Modified oligonucleotides described in the studies above were tested at various doses in SUP-M2 cells. Cultured SUP-M2 cells at a density of 60,000 cells per well were treated using free uptake with modified oligonucleotides diluted to concentrations of 6,000 nM, 1,500 nM, 375.0 nM and 93.75 nM for 24 hours. After 24 hours, Foxp3 mRNA levels were measured as previously described using the Human Foxp3 primer-probe set RTS35925. Foxp3 mRNA levels were adjusted according to total RNA content, as measured by RIBOGREEN®. Results are presented in the tables below as percent control of the amount of Foxp3 mRNA relative to untreated control cells (% UTC). IC50s were calculated using a linear regression on a log/linear plot of the data in excel. The modified oligonucleotides with percent control values marked with an asterisk (*) target the amplicon region of the primer probe set. Additional assays may be used to measure the potency and efficacy of the modified oligonucleotides targeting the amplicon region.

TABLE 66
Dose-dependent inhibition of human Foxp3 mRNA
expression by free uptake of modified oligonucleotides in
SUP-M2 cells

| | % UTC | | | | |
|---|---|---|---|---|---|
| ION | 93.75 | 375.0 | 1500.0 | 6000.0 | IC₅₀ |
| No. | nM | nM | nM | nM | (μM) |
| 911144 | 69 | 81 | 61 | 30 | 2.1 |
| 1154721 | 149 | 89 | 49 | 18 | 1.7 |
| 1154747 | 198 | 140 | 106 | 39 | 5.1 |
| 1154751 | 170 | 107 | 60 | 32 | 2.7 |
| 1154754 | 77 | 91 | 81 | 46 | >6.0 |
| 1154765 | 151 | 98 | 88 | 33 | 3.8 |
| 1154853 | 205 | 149 | 57 | 23 | 2.7 |
| 1154861 | 81 | 86 | 69 | 40 | 5.0 |
| 1154865 | 143 | 77 | 44 | 13 | 1.4 |
| 1154891 | 197 | 188 | 111 | 32 | 5.5 |
| 1154931 | 150 | 118 | 52 | 24 | 2.3 |
| 1154981 | 106 | 122 | 113 | 37 | >6.0 |
| 1154991 | 218 | 154 | 63 | 37 | 3.3 |
| 1155047 | 90 | 72 | 28 | 13 | 0.8 |
| 1155057 | 273 | 110 | 75 | 29 | 2.8 |
| 1155099 | 73 | 57 | 22 | 6 | 0.4 |
| 1155107 | 47 | 41 | 20 | 8 | <0.1 |
| 1155119 | 198 | 182 | 87 | 45 | 5.3 |
| 1155125 | 91 | 130 | 56 | 29 | 3.1 |

TABLE 67
Dose-dependent inhibition of human Foxp3 mRNA
expression by free uptake of modified oligonucleotides in
SUP-M2 cells

| | % UTC | | | | |
|---|---|---|---|---|---|
| ION | 93.75 | 375.0 | 1500.0 | 6000.0 | IC₅₀ |
| No. | nM | nM | nM | nM | (μM) |
| 911144 | 66 | 54 | 35 | 25 | 0.5 |
| 1154778 | 139 | 130 | 68 | 40 | 4.1 |
| 1154803 | 61 | 52 | 23 | 13 | 0.3 |
| 1154821 | 98 | 83 | 79 | 20 | 2.4 |
| 1154833 | 115 | 100 | 101 | 72 | >6.0 |
| 1154858 | 55 | 62 | 64 | 30 | 1.3 |
| 1154875 | 75 | 83 | 41 | 19 | 1.0 |
| 1154893 | 30 | 39 | 23 | 5 | <0.1 |
| 1154898 | 123 | 98 | 54 | 19 | 1.9 |
| 1154924 | 53 | 89 | 49 | 31 | 1.5 |
| 1154928 | 162 | 72 | 44 | 22 | 1.6 |
| 1154929 | 96 | 78 | 33 | 9 | 0.9 |
| 1154930 | 84 | 99 | 28 | 12 | 1.0 |
| 1155031 | 95 | 82 | 77 | 44 | >6.0 |
| 1155032 | 44 | 52 | 19 | 11 | 0.1 |
| 1155048 | 65 | 51 | 24 | 5 | 0.3 |
| 1155108 | 100 | 60 | 24 | 9 | 0.7 |
| 1155109 | 95 | 86 | 39 | 12 | 1.1 |
| 1155121 | 129 | 143 | 125 | 34 | >6.0 |

TABLE 68
Dose-dependent inhibition of human Foxp3 mRNA
expression by free uptake of modified oligonucleotides in
SUP-M2 cells

| | % UTC | | | | |
|---|---|---|---|---|---|
| ION | 93.75 | 375.0 | 1500.0 | 6000.0 | IC₅₀ |
| No. | nM | nM | nM | nM | (μM) |
| 911144 | 74 | 71 | 56 | 31 | 1.6 |
| 1154722 | 77 | 83 | 81 | 67 | >6.0 |
| 1154756 | 92 | 77 | 61 | 28 | 2.0 |
| 1154758 | 109 | 95 | 69 | 49 | 6.0 |
| 1154860 | 135 | 102 | 88 | 41 | 5.1 |
| 1154864 | 114 | 81 | 60 | 35 | 2.5 |
| 1154878 | 131 | 132 | 145 | 95 | >6.0 |
| 1154884 | 119 | 81 | 37 | 15 | 1.2 |
| 1154896 | 107 | 90 | 59 | 27 | 2.1 |
| 1154956 | 110 | 85 | 39 | 20 | 1.4 |
| 1154962 | 98 | 90 | 50 | 5 | 1.2 |
| 1155022 | 79 | 92 | 64 | 61 | >6.0 |
| 1155052 | 92 | 69 | 36 | 17 | 0.9 |
| 1155058 | 112 | 125 | 110 | 57 | >6.0 |
| 1155070 | 71 | 63 | 53 | 23 | 0.9 |
| 1155100 | 125 | 65 | 32 | 8 | 1.0 |
| 1155104 | 149 | 92 | 60 | 29 | 2.4 |
| 1155106 | 108 | 99 | 64 | 31 | 2.8 |
| 1155118 | 85 | 80 | 42 | 27 | 1.3 |

### Example 6: Dose-Dependent Inhibition of Human Foxp3 in CD4 T-Cells by cEt Gapmers

[0407] Modified oligonucleotides described in the studies above were tested at various doses in primary PBMC-derived CD4 T-cells. Total human CD4 T-cells were purified from human peripheral blood leukapheresis sample (Leukopak, Stemcell Technologies) using Easysep human CD4 T-cell isolation kit (Stemcell Technologies). Purified human CD4 cells were cultured in Immunocult-XT T-cell expansion media (Stemcell Technologies) supplemented with 30 ng/mL of human recombinant IL-2 (Stemcell Technologies). Cultured CD4 T-cells at a density of 50,000 cells per well were treated using free uptake with modified oligonucleotides diluted to concentrations specified in the tables below. After a 48 hour incubation, Foxp3 mRNA levels were measured as previously described using the Human Foxp3 primer-probe set RTS35925. Foxp3 mRNA levels were adjusted according to total RNA content, as measured by RIBOGREEN®. Results are presented in the tables below as percent control of the amount of Foxp3 mRNA relative to untreated control cells (% UTC).

TABLE 69
Dose-dependent inhibition of human Foxp3 mRNA
expression by free uptake of modified oligonucleotides in
CD4 T-cells

| | % UTC | | | |
|---|---|---|---|---|
| ION | 109.4 | 437.5 | 1750.0 | 7000.0 |
| No. | nM | nM | nM | nM |
| 141923 | 128 | 104 | 85 | 89 |
| 911144 | 88 | 63 | 61 | 56 |
| 1062008 | 63 | 94 | 104 | 107 |
| 1062010 | 107 | 93 | 96 | 80 |
| 1062086 | 128 | 111 | 120 | 120 |
| 1062413 | 62 | 63 | 58 | 59 |
| 1062425 | 70 | 47 | 54 | 39 |
| 1062428 | 77 | 72 | 71 | 63 |
| 1062529 | 111 | 125 | 125 | 125 |
| 1062760 | 94 | 111 | 109 | 134 |
| 1062891 | 108 | 104 | 101 | 84 |
| 1062938 | 81 | 62 | 59 | 46 |
| 1063101 | 117 | 81 | 89 | 85 |
| 1063237 | 98 | 121 | 121 | 106 |
| 1063238 | 122 | 118 | 149 | 120 |
| 1063268 | 71 | 51 | 46 | 40 |
| 1063619 | 103 | 109 | 127 | 127 |
| 1063963 | 84 | 80 | 83 | 81 |
| 1063976 | 89 | 84 | 79 | 50 |
| 1064313 | 80 | 79 | 64 | 52 |

TABLE 70
Dose-dependent inhibition of human Foxp3 mRNA
expression by free uptake of modified oligonucleotides in
CD4 T-cells

| | % UTC | | | |
|---|---|---|---|---|
| | 109.4 | 437.5 | 1750.0 | 7000.0 |
| ION No. | nM | nM | nM | nM |
| 141923 | 109 | 114 | 84 | 71 |
| 911144 | 80 | 59 | 62 | 51 |
| 1062247 | 79 | 84 | 109 | 86 |
| 1062397 | 100 | 87 | 89 | 93 |
| 1062580 | 103 | 103 | 98 | 101 |
| 1062668 | 73 | 38 | 52 | 41 |
| 1062669 | 83 | 75 | 92 | 82 |
| 1062835 | 111 | 100 | 82 | 85 |
| 1062937 | 75 | 76 | 57 | 46 |
| 1063032 | 84 | 88 | 100 | 76 |
| 1063038 | 100 | 93 | 107 | 111 |
| 1063058 | 90 | 93 | 96 | 103 |
| 1063320 | 96 | 108 | 97 | 124 |
| 1063649 | 82 | 87 | 74 | 60 |
| 1063734 | 58 | 48 | 43 | 32 |
| 1063735 | 95 | 86 | 81 | 89 |
| 1063744 | 102 | 90 | 94 | 108 |
| 1063921 | 95 | 73 | 87 | 91 |
| 1063946 | 79 | 62 | 86 | 56 |
| 1064096 | 74 | 73 | 59 | 62 |

TABLE 71
Dose-dependent inhibition of human Foxp3 mRNA
expression by free uptake of modified oligonucleotides in
CD4 T-cells

| | % UTC | | | |
|---|---|---|---|---|
| | 109.4 | 437.5 | 1750.0 | 7000.0 |
| ION No. | nM | nM | nM | nM |
| 141923 | 113 | 101 | 111 | 110 |
| 582468 | 106 | 115 | 83 | 107 |
| 911144 | 68 | 78 | 51 | 67 |
| 911179 | 115 | 72 | 79 | 71 |
| 1062007 | 107 | 103 | 113 | 106 |
| 1062044 | 102 | 142 | 98 | 130 |
| 1062375 | 121 | 102 | 94 | 102 |
| 1062641 | 90 | 88 | 66 | 103 |
| 1062712 | 84 | 126 | 55 | 142 |
| 1062802 | 99 | 122 | 110 | 98 |
| 1062834 | 101 | 108 | 111 | 97 |
| 1062840 | 112 | 107 | 129 | 142 |
| 1062857 | 124 | 162 | 114 | 169 |
| 1063035 | 137 | 141 | 137 | 78 |
| 1063037 | 78 | 109 | 101 | 114 |
| 1063097 | 175 | 122 | 122 | 109 |
| 1063650 | 95 | 175 | 99 | 160 |
| 1063655 | 65 | 71 | 59 | 46 |
| 1063895 | 33 | 10 | 7 | 5 |
| 1063910 | 93 | 116 | 105 | 93 |

### Example 7: Dose-Dependent Inhibition of Human Foxp3 in Regulatory T-Cells (T-Reg) by cEt Gapmers

[0408] Modified oligonucleotides described in the studies above were tested at various doses in in vitro differentiated regulatory T-cells. T-regs were differentiated for 2 weeks from naïve human CD4 cells (purified from frozen PBMCs (Stemcell technologies) using EasySep human naïve CD4 T-cell isolation kit (Stemcell technologies)) in Immunocult-XT T-cell expansion media (Stemcell Technologies) supplemented with ImmunoCult Human Treg Differentiation Supplement and ImmunoCult Human CD3/CD28 T-cell Activator (Stemcell Technologies). Cultured T-reg cells at a density of 20,000 cells per well were treated using free uptake with modified oligonucleotides diluted to concentrations specified in the tables below. After a 48 hour incubation, Foxp3 mRNA levels were measured as previously described using the Human Foxp3 primer-probe set RTS35925. Foxp3 mRNA levels were adjusted according to total RNA content, as measured by RIBOGREEN®. Results are presented in the tables below as percent control of the amount of Foxp3 mRNA relative to untreated control cells (% UTC).

TABLE 72
Dose-dependent inhibition of human Foxp3 mRNA
expression by free uptake of modified oligonucleotides in
T-reg cells

| | % UTC | | | |
|---|---|---|---|---|
| | 370.4 | 1111.1 | 3333.3 | 10000.0 |
| ION No. | nM | nM | nM | nM |
| 1062010 | 99 | 107 | 98 | 118 |
| 1062835 | 89 | 92 | 102 | 87 |
| 1062247 | 97 | 110 | 120 | 113 |
| 1062840 | 94 | 84 | 83 | 83 |
| 1062413 | 94 | 85 | 74 | 75 |
| 1062857 | 103 | 97 | 94 | 98 |
| 1062428 | 108 | 111 | 105 | 100 |
| 1062891 | 90 | 87 | 72 | 61 |
| 1062641 | 107 | 116 | 114 | 110 |
| 1062937 | 88 | 69 | 63 | 59 |
| 1063101 | 112 | 107 | 106 | 87 |
| 1062669 | 94 | 95 | 86 | 72 |
| 1062938 | 93 | 80 | 65 | 50 |
| 911179 | 98 | 95 | 76 | 57 |
| 1062712 | 113 | 95 | 104 | 107 |
| 1063035 | 99 | 96 | 103 | 86 |
| 1062802 | 106 | 105 | 106 | 99 |
| 1063037 | 104 | 90 | 91 | 67 |

TABLE 73
Dose-dependent inhibition of human Foxp3 mRNA
expression by free uptake of modified oligonucleotides in
T-reg cells

| | % UTC | | | |
|---|---|---|---|---|
| | 370.4 | 1111.1 | 3333.3 | 10000.0 |
| ION No. | nM | nM | nM | nM |
| 1063238 | 102 | 99 | 99 | 94 |
| 1063734 | 75 | 64 | 54 | 35 |
| 1063248 | 92 | 113 | 100 | 107 |
| 1064096 | 85 | 81 | 74 | 72 |
| 1063268 | 97 | 100 | 105 | 88 |
| 1064313 | 97 | 92 | 92 | 81 |
| 1063320 | 113 | 119 | 125 | 129 |
| 1063619 | 108 | 111 | 120 | 115 |
| 911179 | 97 | 77 | 65 | 54 |
| 1063649 | 96 | 98 | 109 | 96 |
| 911144 | 104 | 104 | 89 | 61 |
| 1063650 | 96 | 89 | 82 | 61 |
| 1063655 | 95 | 91 | 87 | 80 |

TABLE 74
Dose-dependent inhibition of human Foxp3 mRNA
expression by free uptake of modified oligonucleotides in
T-reg cells

| | % UTC | | | |
|---|---|---|---|---|
| | 370.4 | 1111.1 | 3333.3 | 10000.0 |
| ION No. | nM | nM | nM | nM |
| 1062010 | 93 | 111 | 103 | 115 |
| 1062835 | 90 | 100 | 102 | 81 |
| 1062247 | 86 | 90 | 99 | 96 |
| 1062840 | 97 | 84 | 86 | 75 |
| 1062413 | 73 | 77 | 61 | 58 |
| 1062857 | 118 | 94 | 81 | 87 |
| 1062428 | 74 | 86 | 77 | 83 |
| 1062891 | 79 | 67 | 70 | 47 |
| 1062641 | 77 | 84 | 91 | 71 |
| 1062937 | 66 | 66 | 58 | 41 |
| 1063101 | 97 | 80 | 74 | 59 |
| 1062669 | 64 | 66 | 62 | 56 |
| 1062938 | 58 | 48 | 41 | 32 |
| 911179 | 88 | 66 | 62 | 47 |
| 1062712 | 66 | 64 | 68 | 64 |
| 1063035 | 59 | 60 | 61 | 46 |
| 1062802 | 55 | 65 | 75 | 71 |
| 1063037 | 58 | 58 | 47 | 41 |

TABLE 75
Dose-dependent inhibition of human Foxp3 mRNA expression by
free uptake of modified oligonucleotides in T-reg cells

% UTC

| ION | 370.4 | 1111.1 | 3333.3 | 10000.0 |
|---|---|---|---|---|
| No. | nM | nM | nM | nM |
| 1063238 | 111 | 108 | 81 | 70 |
| 1063734 | 90 | 80 | 56 | 40 |
| 1063248 | 97 | 105 | 102 | 102 |
| 1064096 | 85 | 88 | 75 | 69 |
| 1063268 | 94 | 92 | 94 | 87 |
| 1064313 | 95 | 89 | 71 | 61 |
| 1063320 | 79 | 80 | 82 | 88 |
| 1063619 | 86 | 91 | 84 | 92 |
| 911179 | 59 | 56 | 54 | 40 |
| 1063649 | 65 | 69 | 64 | 69 |
| 911144 | 81 | 66 | 58 | 47 |
| 1063650 | 56 | 50 | 47 | 34 |
| 1063655 | 70 | 67 | 61 | 57 |

### Example 8: Tolerability of Modified Oligonucleotides Targeting Human Foxp3 in Balb/c Mice

[0409] Balb/c mice were treated with modified oligonucleotides selected from studies described above and evaluated for changes in the levels of various plasma chemistry markers.

### Treatment

[0410] Groups of female Balb/c mice (obtained from Charles River) were injected subcutaneously twice a week for three weeks (for a total of 7 treatments) with 50 mg/kg of modified oligonucleotides. One group of female Balb/c mice was injected with PBS. Mice were euthanized on day 21 post start of treatment (24 hours following the final administration).

### Plasma Chemistry Markers

[0411] To evaluate the effect of modified oligonucleotides on liver function, plasma levels of blood urea nitrogen (BUN), albumin, alanine aminotransferase (ALT), aspartate aminotransferase (AST), total bilirubin (TBIL), and albumin (ALB) were measured using an automated clinical chemistry analyzer (Hitachi Olympus AU400c, Melville, N.Y.). The results are presented in the Table below. Modified oligonucleotides that caused changes in the levels of any of the liver or kidney function markers outside the expected range for modified oligonucleotides were excluded in further studies.

TABLE 76
Plasma chemistry markers in female Balb/c mice

| | Plasma clinical chemistry | | | | |
|---|---|---|---|---|---|
| ION | ALB | ALT | AST | TBIL | BUN |
| No. | (g/dL) | (U/L) | (U/L) | (mg/dL) | (mg/dL) |
| PBS | 2.6 | 86 | 108 | 0.3 | 19 |
| 549148 | 2.8 | 30 | 48 | 0.2 | 20 |
| 910956 | 2.7 | 992 | 1040 | 0.2 | 15 |
| 910959 | 3.2 | 1311 | 869 | 1.3 | 15 |
| 911019 | 3.6 | 1118 | 893 | 0.3 | 19 |
| 911101 | 2.8 | 1709 | 1506 | 0.7 | 13 |
| 911118 | 2.8 | 968 | 524 | 4.9 | 15 |
| 911144 | 2.7 | 1138 | 843 | 0.3 | 22 |
| L0911171 | 3.1 | 1144 | 1120 | 0.6 | 21 |
| 911179 | 2.9 | 453 | 353 | 0.2 | 20 |
| 911180 | 2.5 | 170 | 143 | 0.2 | 16 |

### Body and Organ Weights

[0412] Body weights of Balb/c mice were measured on day 22, and the average body weight for each group is presented in the table below. Kidney, spleen, and liver weights were measured at the end of the study and are presented in the table below. Modified oligonucleotides that caused any changes in organ weights outside the expected range for modified oligonucleotides were excluded from further studies.

TABLE 77
Body and organ weights (in grams)

| | body | | | |
|---|---|---|---|---|
| ION | weight | Liver | Kidney | Spleen |
| No. | (g) | (g) | (g) | (g) |
| PBS | 22 | 1.08 | 0.28 | 0.12 |
| 549148 | 21 | 1.16 | 0.29 | 0.12 |
| 910956 | 21 | 1.36 | 0.27 | 0.12 |
| 910959 | 22 | 1.38 | 0.35 | 0.12 |
| 911019 | 23 | 1.61 | 0.32 | 0.12 |
| 911101 | 18 | 1.48 | 0.26 | 0.13 |
| 911118 | 16 | 1.01 | 0.25 | 0.09 |
| 911144 | 22 | 1.49 | 0.26 | 0.15 |
| 911171 | 19 | 1.30 | 0.28 | 0.17 |
| 911179 | 20 | 1.26 | 0.25 | 0.14 |
| 911180 | 21 | 1.22 | 0.26 | 0.14 |

### Example 9: Tolerability of Modified Oligonucleotides Targeting Human Foxp3 in CD-1 Mice

[0413] CD-1 mice were treated with modified oligonucleotides selected from studies described above and evaluated for changes in the levels of various plasma chemistry markers.

### Treatment

[0414] Groups of male CD-1 mice (obtained from Charles River) were injected subcutaneously once a week for six weeks (for a total of 7 treatments) with 50 mg/kg of modified oligonucleotides. One group of male CD-1 mice was injected with PBS. Mice were euthanized on day 39 post start of treatment (24 hours following the final administration).

### Plasma Chemistry Markers

[0415] To evaluate the effect of modified oligonucleotides on liver function, plasma levels of blood urea nitrogen (BUN), albumin, alanine aminotransferase (ALT), aspartate aminotransferase (AST), total bilirubin (TBIL), and albumin (ALB) were measured using an automated clinical chemistry analyzer (Hitachi Olympus AU400c, Melville, N.Y.). The results are presented in the table below. Modified oligonucleotides that caused changes in the levels of any of the liver or kidney function markers outside the expected range for modified oligonucleotides were excluded in further studies.

TABLE 78
Plasma chemistry markers in male CD-1 mice

| | Plasma clinical chemistry | | | | |
|---|---|---|---|---|---|
| ION | ALB | ALT | AST | TBIL | BUN |
| No. | (g/dL) | (U/L) | (U/L) | (mg/dL) | (mg/dL) |
| PBS | 2.8 | 27 | 48 | 0.2 | 19 |
| 1062008 | 2.2 | 836 | 1125 | 9.1 | 24 |
| 1062010 | 2.2 | 105 | 139 | 0.2 | 18 |
| 1062385 | 2.4 | 3206 | 3112 | 0.7 | 20 |
| 1062425 | 2.5 | 612 | 490 | 7.1 | 19 |
| 1062545 | 2.3 | 74 | 70 | 0.2 | 21 |
| 1062641 | 2.3 | 86 | 95 | 0.1 | 21 |
| 1062838 | 2.4 | 178 | 232 | 0.3 | 18 |
| 1062903 | 2.5 | 220 | 408 | 0.3 | 18 |
| 1062907 | 3.2 | 2055 | 1321 | 2.4 | 21 |
| 1062937 | 2.6 | 100 | 97 | 0.2 | 22 |
| 1063038 | 2.8 | 480 | 279 | 0.2 | 19 |
| 1063158 | 2.6 | 37 | 56 | 0.2 | 21 |
| 1063414 | 3.0 | 2316 | 1649 | 0.3 | 21 |
| 1063734 | 2.7 | 63 | 76 | 0.2 | 18 |
| 1063984 | 3.0 | 1382 | 767 | 6.3 | 26 |
| 1064060 | 3.4 | 3034 | 1927 | 0.8 | 21 |
| 1064313 | 2.3 | 107 | 109 | 0.2 | 17 |

### Body and Organ Weights

[0416] Body weights of CD-1 mice were measured on the day the mice were sacrificed, and the average body weight for each group is presented in the Table below. Kidney, spleen, and liver weights were measured at the end of the study and are presented in the Table below. Modified oligonucleotides that caused any changes in organ weights outside the expected range for modified oligonucleotides were excluded from further studies.

TABLE 79
Body and organ weights (in grams)

| | body | | | |
|---|---|---|---|---|
| ION | weight | Liver | Kidney | Spleen |
| No. | (g) | (g) | (g) | (g) |
| PBS | 38 | 1.88 | 0.58 | 0.12 |
| 1062008 | 34 | 2.65 | 0.49 | 0.84 |
| 1062010 | 40 | 2.21 | 0.57 | 0.18 |
| 1062385 | 37 | 2.65 | 0.60 | 0.19 |
| 1062425 | 33 | 3.13 | 0.46 | 0.18 |
| 1062545 | 36 | 2.09 | 0.56 | 0.12 |
| 1062641 | 40 | 2.31 | 0.54 | 0.20 |
| 1062838 | 39 | 2.04 | 0.53 | 0.14 |
| 1062903 | 33 | 2.04 | 0.55 | 0.16 |
| 1062907 | 37 | 3.85 | 0.54 | 0.19 |
| 1062937 | 38 | 2.23 | 0.63 | 0.13 |
| 1063038 | 39 | 2.56 | 0.65 | 0.27 |
| 1063158 | 39 | 1.96 | 0.62 | 0.13 |
| 1063414 | 35 | 2.75 | 0.67 | 0.17 |
| 1063734 | 39 | 2.05 | 0.59 | 0.14 |
| 1063984 | 28 | 2.09 | 0.38 | 0.07 |
| 1064060 | 36 | 2.64 | 0.58 | 0.08 |
| 1064313 | 39 | 2.04 | 0.62 | 0.14 |

### Hematology Assays

[0417] Blood obtained from mouse groups at day 40 were sent to IDEXX BioResearch for measurement of blood cell counts. Counts taken include red blood cell (RBC) count, white blood cell (WBC) count, hemoglobin (HGB), hematocrit (HCT), Mean corpuscular volume (MCV), mean corpuscular hemoglobin (MCH), mean corpuscular hemoglobin concentration (MCHC), and individual white blood cell counts, such as that of monocytes (MON), neutrophils (NEU), lymphocytes (LYM), eosinophils (EOS), basophils (BAS), reticulocytes (RETIC) and platelets (PLT). The results are presented in the tables below. N. D refers to samples where data is not available. Ionis oligonucleotides that caused changes in the blood cell count outside the expected range for modified oligonucleotides were excluded in further studies.

TABLE 80
Blood Cell Count in CD-1 mice

| ION | RBC | Retic | HCT | HGB | MCV | MCH | MCHC |
|---|---|---|---|---|---|---|---|
| No. | (M/uL) | (K/uL) | (%) | (g/dL) | (fL) | (pg) | (g/dL) |
| PBS | 8 | 312 | 40 | 13 | 47 | 16 | 33 |
| 1062008 | 5 | 1308 | 36 | 9 | 72 | 18 | 26 |
| 1062010 | 10 | 310 | 43 | 15 | 45 | 15 | 34 |
| 1062385 | 8 | 339 | 37 | 12 | 45 | 15 | 32 |
| 1062425 | 8 | 272 | 36 | 11 | 47 | 15 | 32 |
| 1062545 | 9 | 267 | 41 | 14 | 45 | 15 | 33 |
| 1062641 | 8 | 332 | 38 | 13 | 45 | 15 | 33 |
| 1062838 | 8 | 299 | 40 | 12 | 48 | 15 | 31 |
| 1062903 | 8 | 431 | 39 | 12 | 50 | 16 | 32 |
| 1062907 | 9 | 410 | 42 | 13 | 46 | 14 | 31 |
| 1062937 | 11 | 346 | 52 | 17 | 47 | 15 | 33 |
| 1063038 | 8 | 279 | 40 | 12 | 50 | 15 | 30 |
| 1063158 | 11 | 376 | 50 | 16 | 47 | 15 | 31 |
| 1063414 | 8 | 154 | 36 | 11 | 48 | 15 | 31 |
| 1063734 | 10 | 328 | 48 | 14 | 47 | 14 | 30 |
| 1063984 | 8 | 381 | 38 | 11 | 50 | 15 | 31 |
| 1064060 | 8 | 303 | 35 | 11 | 45 | 14 | 31 |
| 1064313 | 10 | 350 | 49 | 15 | 47 | 15 | 31 |

TABLE 81
Blood Cell Count in CD-1 mice

| ION | WBC | LYM | MON | NEU | EOS | PLT |
|---|---|---|---|---|---|---|
| No. | (K/uL) | (/uL) | (/uL) | (/uL) | (/uL) | (K/uL) |
| PBS | 4 | 2817 | 63 | 597 | 124 | 988 |
| 1062008 | 40 | 30502 | 1399 | 7366 | 379 | 208 |
| 1062010 | 6 | 3961 | 449 | 1159 | 181 | 775 |
| 1062385 | 21 | 12537 | 957 | 6621 | 572 | 1118 |
| 1062425 | 11 | 6560 | 1030 | 2608 | 692 | 963 |
| 1062545 | 4 | 3226 | 204 | 721 | 175 | 1182 |
| 1062641 | 3 | 2506 | 307 | 475 | 109 | 779 |
| 1062838 | 7 | 3961 | 539 | 1793 | 275 | 896 |
| 1062903 | 19 | 14165 | 1005 | 3595 | 451 | 595 |
| 1062907 | 8 | 5351 | 909 | 1635 | 193 | 885 |
| 1062937 | 4 | 2287 | 414 | 769 | 118 | 958 |
| 1063038 | 8 | 5063 | 1512 | 936 | 103 | 943 |
| 1063158 | 3 | 2145 | 210 | 707 | 108 | 1141 |
| 1063414 | 13 | 7724 | 1404 | 3786 | 270 | 1924 |
| 1063734 | 5 | 3822 | 795 | 644 | 92 | 1044 |
| 1063984 | 12 | 6263 | 1057 | 4238 | 232 | 1169 |
| 1064060 | 7 | 4110 | 1044 | 1459 | 94 | 1093 |
| 1064313 | 5 | 3475 | 515 | 1026 | 96 | 936 |

### Example 10: Tolerability of Modified Oligonucleotides Targeting Human Foxp3 in CD-1 Mice

[0418] CD-1 mice were treated with modified oligonucleotides selected from studies described above and evaluated for changes in the levels of various plasma chemistry markers.

### Treatment

[0419] Groups of male CD-1 mice (obtained from Charles River) were injected subcutaneously once a week for six weeks (for a total of 7 treatments) with 50 mg/kg of modified oligonucleotides. One group of male CD-1 mice was injected with PBS. Mice were euthanized on day 40 post start of treatment (24 hours following the final administration). In addition, 6 additional groups of mice (treated with ION Nos. 1062413, 1062669, 1062712, 1062835, 1063655, and 1063946) were treated subcutaneously once a week for 5 weeks (a total of 6 treatments) with 50 mg/kg of modified oligonucleotides. Mice were euthanized on day 33 post start of treatment (24 hrs post following the final administration).

### Plasma Chemistry Markers

[0420] To evaluate the effect of modified oligonucleotides on liver function, plasma levels of blood urea nitrogen (BUN), albumin, alanine aminotransferase (ALT), aspartate aminotransferase (AST), total bilirubin (TBIL), and albumin (ALB) were measured using an automated clinical chemistry analyzer (Hitachi Olympus AU400c, Melville, N.Y.). The results are presented in the Table below. Modified oligonucleotides that caused changes in the levels of any of the liver or kidney function markers outside the expected range for modified oligonucleotides were excluded in further studies.

TABLE 82
Plasma chemistry markers in male CD-1 mice

| | Plasma clinical chemistry | | | | |
|---|---|---|---|---|---|
| ION | ALB | ALT | AST | TBIL | BUN |
| No. | (g/dL) | (U/L) | (U/L) | (mg/dL) | (mg/dL) |
| PBS | 2.8 | 23 | 42 | 0.2 | 28 |
| 1062007 | 2.1 | 1051 | 1244 | 1.1 | 31 |
| 1062413 | 2.5 | 95 | 68 | 0.2 | 27 |
| 1062580 | 2.4 | 220 | 154 | 0.2 | 23 |
| 1062669 | 2.4 | 61 | 82 | 0.1 | 21 |
| 1062712 | 2.3 | 101 | 107 | 0.2 | 20 |
| 1062724 | 2.6 | 999 | 694 | 0.2 | 25 |
| 1062802 | 2.7 | 153 | 101 | 0.2 | 23 |
| 1062835 | 2.3 | 120 | 104 | 0.1 | 24 |
| 1062857 | 2.6 | 66 | 73 | 0.2 | 24 |
| 1062891 | 2.5 | 64 | 81 | 0.1 | 25 |
| 1063032 | 2.5 | 452 | 282 | 0.2 | 25 |
| 1063238 | 2.7 | 71 | 74 | 0.2 | 26 |
| 1063248 | 2.1 | 103 | 171 | 0.1 | 25 |
| 1063650 | 2.8 | 59 | 76 | 0.2 | 25 |
| 1063655 | 2.3 | 52 | 93 | 0.1 | 20 |
| 1063744 | 2.4 | 308 | 212 | 0.2 | 22 |
| 1063910 | 2.5 | 371 | 296 | 0.1 | 24 |
| 1063946 | 3.0 | 1136 | 696 | 0.5 | 24 |
| 1063981 | 3.3 | 767 | 909 | 3.0 | 27 |

### Body and Organ Weights

[0421] Body weights of CD-1 mice were measured on the day the mice were sacrificed, and the average body weight for each group is presented in the Table below. Kidney, spleen, and liver weights were measured at the end of the study and are presented in the Table below. Modified oligonucleotides that caused any changes in organ weights outside the expected range for modified oligonucleotides were excluded from further studies.

TABLE 83
Body and organ weights (in grams)

| | body | | | |
|---|---|---|---|---|
| ION | weight | Liver | Kidney | Spleen |
| No. | (g) | (g) | (g) | (g) |
| PBS | 40 | 2.08 | 0.61 | 0.11 |
| 1062007 | 34 | 2.76 | 0.52 | 0.65 |
| 1062413 | 38 | 2.20 | 0.55 | 0.11 |
| 1062580 | 38 | 2.47 | 0.58 | 0.18 |
| 1062669 | 39 | 2.47 | 0.54 | 0.15 |
| 1062712 | 35 | 2.01 | 0.61 | 0.17 |
| 1062724 | 34 | 2.92 | 0.54 | 0.22 |
| 1062802 | 37 | 1.97 | 0.58 | 0.12 |
| 1062835 | 36 | 2.27 | 0.59 | 0.16 |
| 1062857 | 41 | 2.42 | 0.66 | 0.13 |
| 1062891 | 40 | 2.36 | 0.65 | 0.19 |
| 1063032 | 39 | 2.87 | 0.80 | 0.23 |
| 1063238 | 39 | 2.44 | 0.61 | 0.11 |
| 1063248 | 39 | 2.42 | 0.54 | 0.16 |
| 1063650 | 37 | 2.28 | 0.58 | 0.12 |
| 1063655 | 38 | 1.96 | 0.59 | 0.15 |
| 1063744 | 44 | 2.73 | 0.78 | 0.20 |
| 1063910 | 49 | 3.64 | 0.66 | 0.19 |
| 1063946 | 37 | 2.88 | 0.64 | 0.21 |
| 1063981 | 35 | 4.08 | 0.49 | 0.14 |

### Hematology Assays

[0422] Blood obtained from mouse groups at day 40 were sent to IDEXX BioResearch for measurement of blood cell counts. Counts taken include red blood cell (RBC) count, white blood cell (WBC) count, hemoglobin (HGB), hematocrit (HCT), Mean corpuscular volume (MCV), mean corpuscular hemoglobin (MCH), mean corpuscular hemoglobin concentration (MCHC), and individual white blood cell counts, such as that of monocytes (MON), neutrophils (NEU), lymphocytes (LYM), eosinophils (EOS), basophils (BAS), reticulocytes (RETIC) and platelets (PLT). The results are presented in the tables below. Ionis oligonucleotides that caused changes in the blood cell count outside the expected range for modified oligonucleotides were excluded in further studies.

TABLE 84
Blood Cell Count in CD-1 mice

| ION | RBC | Retic | HCT | HGB | MCV | MCH | MCHC |
|---|---|---|---|---|---|---|---|
| No. | (M/uL) | (K/uL) | (%) | (g/dL) | (fL) | (pg) | (g/dL) |
| PBS | 700 | 4 | 262 | 8 | 12 | 3395 | 37 |
| 1062007 | 29943 | 65 | 1018 | 4 | 8 | 19758 | 32 |
| 1062413 | 892 | 6 | 267 | 8 | 12 | 4416 | 38 |
| 1062580 | 1585 | 18 | 258 | 8 | 12 | 15847 | 36 |
| 1062669 | 732 | 6 | 292 | 9 | 13 | 4748 | 40 |
| 1062712 | 661 | 6 | 287 | 9 | 14 | 4716 | 42 |
| 1062724 | 3723 | 21 | 521 | 8 | 12 | 15787 | 37 |
| 1062802 | 1088 | 8 | 235 | 7 | 10 | 6087 | 30 |
| 1062835 | 1172 | 6 | 302 | 10 | 15 | 4172 | 44 |
| 1062857 | 730 | 6 | 325 | 10 | 15 | 4736 | 43 |
| 1062891 | 988 | 7 | 284 | 8 | 13 | 5892 | 38 |
| 1063032 | 1678 | 12 | 434 | 10 | 15 | 9049 | 44 |
| 1063238 | 986 | 7 | 304 | 10 | 15 | 5537 | 43 |
| 1063248 | 1246 | 10 | 293 | 9 | 14 | 8042 | 42 |
| 1063650 | 542 | 6 | 266 | 9 | 13 | 4770 | 41 |
| 1063655 | 883 | 6 | 337 | 9 | 14 | 4277 | 41 |
| 1063744 | 1218 | 9 | 388 | 10 | 16 | 7135 | 49 |
| 1063910 | 1171 | 12 | 246 | 8 | 12 | 9552 | 37 |
| 1063946 | 2081 | 17 | 369 | 9 | 14 | 12975 | 41 |
| 1063981 | 3304 | 20 | 297 | 9 | 14 | 14916 | 43 |

TABLE 85
Blood Cell Count in CD-1 mice

| ION | WBC | LYM | MON | NEU | EOS | PLT |
|---|---|---|---|---|---|---|
| No. | (K/uL) | (/uL) | (/uL) | (/uL) | (/uL) | (K/uL) |
| PBS | 210 | 70 | 47 | 15 | 33 | 458 |
| 1062007 | 5231 | 1215 | 75 | 20 | 26 | 148 |
| 1062413 | 277 | 235 | 47 | 15 | 33 | 1215 |
| 1062580 | 584 | 341 | 45 | 15 | 34 | 1186 |
| 1062669 | 401 | 194 | 47 | 15 | 33 | 1076 |
| 1062712 | 349 | 195 | 46 | 15 | 34 | 984 |
| 1062724 | 1454 | 253 | 44 | 14 | 32 | 1186 |
| 1062802 | 372 | 301 | 46 | 15 | 33 | 1289 |
| 1062835 | 249 | 158 | 46 | 16 | 34 | 979 |
| 1062857 | 233 | 198 | 45 | 15 | 34 | 1072 |
| 1062891 | 397 | 196 | 46 | 15 | 33 | 909 |
| 1063032 | 583 | 261 | 46 | 15 | 33 | 837 |
| 1063238 | 241 | 133 | 46 | 15 | 34 | 963 |
| 1063248 | 725 | 247 | 47 | 16 | 33 | 728 |
| 1063650 | 222 | 213 | 46 | 15 | 33 | 950 |
| 1063655 | 228 | 159 | 46 | 16 | 34 | 892 |
| 1063744 | 468 | 261 | 49 | 16 | 33 | 708 |
| 1063910 | 857 | 259 | 47 | 15 | 32 | 847 |
| 1063946 | 918 | 520 | 44 | 15 | 34 | 797 |
| 1063981 | 1230 | 362 | 48 | 15 | 32 | 899 |

### Example 11: Tolerability of Modified Oligonucleotides Targeting Human Foxp3 in CD-1 Mice

[0423] CD-1 mice were treated with modified oligonucleotides selected from studies described above and evaluated for changes in the levels of various plasma chemistry markers.

### Treatment

[0424] Groups of male CD-1 mice (obtained from Charles River) were injected subcutaneously once a week for six weeks (for a total of 7 treatments) with 50 mg/kg of modified oligonucleotides. One group of male CD-1 mice was injected with PBS. Mice were euthanized on day 41 post start of treatment (24 hours following the final administration). In addition, 4 additional groups of mice (treated with ION Nos. 1062247, 1063619, 1063653, and 1064096) were treated subcutaneously once a week for 5 weeks (a total of 6 treatments) with 50 mg/kg of modified oligonucleotides. Mice were euthanized on day 38 post start of treatment (5 days following the final administration).

### Plasma Chemistry Markers

[0425] To evaluate the effect of modified oligonucleotides on liver function, plasma levels of blood urea nitrogen (BUN), albumin, alanine aminotransferase (ALT), aspartate aminotransferase (AST), total bilirubin (TBIL), and albumin (ALB) were measured using an automated clinical chemistry analyzer (Hitachi Olympus AU400c, Melville, N.Y.). The results are presented in the table below. Modified oligonucleotides that caused changes in the levels of any of the liver or kidney function markers outside the expected range for modified oligonucleotides were excluded in further studies.

TABLE 86
Plasma chemistry markers in male CD-1 mice

| | Plasma clinical chemistry | | | | |
|---|---|---|---|---|---|
| ION | ALB | ALT | AST | TBIL | BUN |
| No. | (g/dL) | (U/L) | (U/L) | (mg/dL) | (mg/dL) |
| PBS | 3.4 | 27 | 44 | 0.18 | 33 |
| 1062034 | 3.7 | 623 | 401 | 0.19 | 28 |
| 1062044 | 3.7 | 2279 | 1471 | 3.13 | 33 |
| 1062086 | 3.6 | 271 | 167 | 0.22 | 26 |
| 1062247 | 3.0 | 123 | 150 | 0.28 | 22 |
| 1062397 | 2.9 | 1455 | 1777 | 3.11 | 26 |
| 1062428 | 2.8 | 132 | 110 | 0.26 | 23 |
| 1062529 | 2.7 | 991 | 612 | 0.17 | 25 |
| 1062668 | 2.6 | 537 | 448 | 0.17 | 21 |
| 1062760 | 2.6 | 1086 | 603 | 0.24 | 20 |
| 1062840 | 2.6 | 38 | 52 | 0.17 | 25 |
| 1063035 | 2.3 | 97 | 110 | 0.14 | 23 |
| 1063037 | 2.5 | 99 | 89 | 0.15 | 21 |
| 1063058 | 2.4 | 1173 | 1307 | 0.24 | 26 |
| 1063097 | 3.0 | 1239 | 1219 | 0.99 | 27 |
| 1063101 | 2.7 | 48 | 62 | 0.21 | 25 |
| 1063237 | 3.1 | 1108 | 736 | 0.27 | 21 |
| 1063268 | 3.0 | 60 | 76 | 0.21 | 26 |
| 1063320 | 3.4 | 69 | 72 | 0.25 | 23 |
| 1063619 | 3.1 | 99 | 126 | 0.26 | 26 |
| 1063649 | 3.0 | 67 | 85 | 0.18 | 20 |
| 1063653 | 3.7 | 3499 | 2440 | 1.11 | 31 |
| 1063735 | 2.7 | 1440 | 1224 | 0.36 | 22 |
| 1063895 | 3.1 | 1533 | 1261 | 0.63 | 24 |
| 1063921 | 1.3 | 674 | 1603 | 2.70 | 29 |
| 1063963 | 3.1 | 2918 | 2985 | 0.98 | 24 |
| 1064096 | 3.0 | 31 | 103 | 0.22 | 23 |

### Body and Organ Weights

[0426] Body weights of CD-1 mice were measured on the day the mice were sacrificed, and the average body weight for each group is presented in the table below. Kidney, spleen, and liver weights were measured at the end of the study and are presented in the table below. Modified oligonucleotides that caused any changes in organ weights outside the expected range for modified oligonucleotides were excluded from further studies.

TABLE 87
Body and organ weights (in grams)

| | body | | | |
|---|---|---|---|---|
| ION | weight | Liver | Kidney | Spleen |
| No. | (g) | (g) | (g) | (g) |
| PBS | 37 | 1.97 | 0.58 | 0.10 |
| 1062034 | 41 | 2.64 | 0.66 | 0.16 |
| 1062044 | 35 | 3.50 | 0.54 | 0.15 |
| 1062086 | 37 | 2.52 | 0.53 | 0.15 |
| 1062247 | 37 | 2.13 | 0.57 | 0.14 |
| 1062397 | 36 | 2.52 | 0.54 | 0.13 |
| 1062428 | 36 | 2.31 | 0.51 | 0.14 |
| 1062529 | 41 | 3.63 | 0.73 | 0.27 |
| 1062668 | 35 | 2.37 | 0.56 | 0.17 |
| 1062760 | 37 | 2.58 | 0.58 | 0.15 |
| 1062840 | 41 | 2.43 | 0.68 | 0.20 |
| 1063035 | 42 | 2.52 | 0.61 | 0.18 |
| 1063037 | 43 | 2.76 | 0.63 | 0.21 |
| 1063058 | 36 | 2.75 | 0.57 | 0.20 |
| 1063097 | 35 | 2.67 | 0.52 | 0.19 |
| 1063101 | 42 | 2.42 | 0.67 | 0.16 |
| 1063237 | 38 | 2.74 | 0.51 | 0.15 |
| 1063268 | 40 | 2.19 | 0.51 | 0.12 |
| 1063320 | 42 | 2.64 | 0.62 | 0.18 |
| 1063619 | 37 | 36.75 | 2.10 | 0.56 |
| 1063649 | 37 | 2.18 | 0.55 | 0.17 |
| 1063653 | 35 | 3.54 | 0.57 | 0.13 |
| 1063735 | 41 | 2.39 | 0.56 | 0.18 |
| 1063895 | 40 | 3.29 | 0.66 | 0.20 |
| 1063921 | 35 | 1.19 | 0.35 | 0.06 |
| 1063963 | 30 | 3.14 | 0.46 | 0.09 |
| 1064096 | 41 | 2.14 | 0.58 | 0.18 |

### Hematology Assays

[0427] Blood obtained from mouse groups at day 40 were sent to IDEXX BioResearch for measurement of blood cell counts. Counts taken include red blood cell (RBC) count, white blood cell (WBC) count, hemoglobin (HGB), hematocrit (HCT), Mean corpuscular volume (MCV), mean corpuscular hemoglobin (MCH), mean corpuscular hemoglobin concentration (MCHC), and individual white blood cell counts, such as that of monocytes (MON), neutrophils (NEU), lymphocytes (LYM), eosinophils (EOS), basophils (BAS), reticulocytes (RETIC) and platelets (PLT). The results are presented in the tables below. N/A below refers to samples where data is not available due to insufficient blood volume. Ionis oligonucleotides that caused changes in the blood cell count outside the expected range for modified oligonucleotides were excluded in further studies.

TABLE 88
Blood Cell Count in CD-1 mice

| ION | RBC | Retic | HCT | HGB | MCV | MCH | MCHC |
|---|---|---|---|---|---|---|---|
| No. | (M/uL) | (K/uL) | (%) | (g/dL) | (fL) | (pg) | (g/dL) |
| PBS | 9 | 306 | 40 | 14 | 45 | 15 | 33 |
| 1062034 | 8 | 230 | 35 | 11 | 44 | 14 | 33 |
| 1062044 | 9 | 303 | 40 | 13 | 46 | 15 | 33 |
| 1062086 | 8 | 223 | 34 | 11 | 45 | 15 | 33 |
| 1062247 | 9 | 334 | 41 | 14 | 48 | 16 | 33 |
| 1062397 | 7 | 280 | 31 | 10 | 46 | 15 | 33 |
| 1062428 | 10 | 319 | 43 | 14 | 45 | 15 | 33 |
| 1062529 | 9 | 246 | 39 | 13 | 42 | 15 | 34 |
| 1062668 | 9 | 331 | 42 | 14 | 44 | 15 | 33 |
| 1062760 | 9 | 266 | 41 | 14 | 45 | 15 | 34 |
| 1062840 | 9 | 274 | 41 | 13 | 46 | 15 | 33 |
| 1063035 | 9 | 232 | 39 | 13 | 46 | 15 | 33 |
| 1063037 | 7 | 260 | 33 | 11 | 48 | 15 | 32 |
| 1063058 | 9 | 313 | 41 | 13 | 47 | 15 | 33 |
| 1063097 | 10 | 329 | 48 | 15 | 48 | 15 | 32 |
| 1063101 | 10 | 273 | 49 | 15 | 50 | 15 | 31 |
| 1063237 | 9 | 213 | 39 | 13 | 44 | 15 | 33 |
| 1063268 | 11 | 297 | 51 | 16 | 48 | 15 | 31 |
| 1063320 | 10 | 271 | 46 | 15 | 46 | 15 | 32 |
| 1063619 | 8 | 269 | 39 | 13 | 47 | 15 | 33 |
| 1063649 | 10 | 255 | 44 | 14 | 46 | 15 | 32 |
| 1063653 | 8 | 421 | 35 | 11 | 46 | 15 | 32 |
| 1063735 | 9 | 325 | 44 | 14 | 47 | 15 | 32 |
| 1063895 | 10 | 314 | 44 | 14 | 45 | 14 | 33 |
| 1063921 | N/A | N/A | N/A | N/A | N/A | N/A | N/A |
| 1063963 | 9 | 394 | 44 | 14 | 48 | 15 | 32 |
| 1064096 | 8 | 316 | 37 | 12 | 46 | 15 | 33 |

TABLE 89
Blood Cell Count in CD-1 mice

| ION | WBC | LYM | MON | NEU | EOS | PLT |
|---|---|---|---|---|---|---|
| No. | (K/uL) | (/uL) | (/uL) | (/uL) | (/uL) | (K/uL) |
| PBS | 6 | 4358 | 234 | 1097 | 133 | 1251 |
| 1062034 | 12 | 9581 | 718 | 1333 | 384 | 951 |
| 1062044 | 23 | 11726 | 1569 | 2757 | 521 | 1370 |
| 1062086 | 9 | 7082 | 743 | 1371 | 201 | 1066 |
| 1062247 | 6 | 4230 | 517 | 1447 | 75 | 971 |
| 1062397 | 21 | 15205 | 1188 | 4188 | 236 | 547 |
| 1062428 | 9 | 6947 | 526 | 875 | 222 | 1002 |
| 1062529 | 6 | 3214 | 461 | 2504 | 103 | 887 |
| 1062668 | 14 | 10018 | 1248 | 2217 | 378 | 1048 |
| 1062760 | 7 | 4690 | 517 | 1352 | 200 | 851 |
| 1062840 | 5 | 4274 | 506 | 594 | 102 | 772 |
| 1063035 | 11 | 8936 | 533 | 1402 | 294 | 1097 |
| 1063037 | 5 | 3493 | 69 | 1467 | 13 | 461 |
| 1063058 | 22 | 16671 | 1649 | 3215 | 324 | 942 |
| 1063097 | 15 | 10425 | 2326 | 1692 | 314 | 880 |
| 1063101 | 6 | 4212 | 503 | 953 | 124 | 990 |
| 1063237 | 5 | 3996 | 536 | 760 | 172 | 1242 |
| 1063268 | 5 | 4341 | 365 | 616 | 86 | 1082 |
| 1063320 | 7 | 5701 | 367 | 700 | 124 | 1129 |
| 1063619 | 6 | 4783 | 622 | 832 | 185 | 1198 |
| 1063649 | 7 | 5429 | 430 | 902 | 161 | 1116 |
| 1063653 | 18 | 9995 | 2571 | 4439 | 1228 | 1465 |
| 1063735 | 6 | 4547 | 630 | 1016 | 70 | 819 |
| 1063895 | 11 | 7987 | 965 | 1877 | 113 | 1223 |
| 1063921 | N/A | N/A | N/A | N/A | N/A | N/A |
| 1063963 | 25 | 15990 | 2336 | 5937 | 940 | 1443 |
| 1064096 | 10 | 8031 | 661 | 858 | 195 | 986 |

### Example 12: Tolerability of Modified Oligonucleotides Targeting Human Foxp3 in Sprague-Dawley Rats

[0428] Sprague-Dawley rats are a multipurpose model used for safety and efficacy evaluations. The rats were treated with Ionis modified oligonucleotides from the studies described in the Examples above and evaluated for changes in the levels of various plasma chemistry markers.

### Treatment

[0429] Male Sprague-Dawley rats were maintained on a 12-hour light/dark cycle and fed ad libitum with Purina normal rat chow. Groups of 4 Sprague-Dawley rats each were weekly injected subcutaneously with 50 mg/kg of Ionis oligonucleotide for 6 weeks (total 7 doses). In addition, a group of 3 Sprague-Dawley rats was injected subcutaneously with saline for the same time period. Forty-eight hours after the last dose, the rats were euthanized; and organs, urine and plasma were harvested for further analysis.

### Plasma Chemistry Markers

[0430] To evaluate the effect of Ionis oligonucleotides on hepatic function, plasma levels of transaminases were measured using an automated clinical chemistry analyzer (Hitachi Olympus AU400c, Melville, N.Y.). Plasma levels of ALT (alanine transaminase) and AST (aspartate transaminase) were measured and the results are presented in the Table below expressed in IU/L. Plasma levels of total bilirubin (TBIL), albumin (ALB), and blood urea nitrogen (BUN) were also measured using the same clinical chemistry analyzer and the results are also presented in the Table below. Ionis modified oligonucleotides that caused changes in the levels of any markers of liver function outside the expected range for modified oligonucleotides were excluded in further studies.

TABLE 90
Plasma chemistry markers in Sprague-Dawley rats

| ION | ALB | ALT | AST | TBIL | BUN |
|---|---|---|---|---|---|
| NO. | (g/dL) | (IU/L) | (IU/L) | (mg/dL) | (mg/dL) |
| Saline | 3.7 | 66 | 105 | 0.15 | 18 |
| 1062428 | 4.2 | 146 | 149 | 0.23 | 26 |
| 1062641 | 3.2 | 75 | 155 | 0.12 | 20 |
| 1062835 | 1.9 | 45 | 70 | 0.12 | 64 |
| 1062937 | 3.1 | 129 | 164 | 0.16 | 23 |
| 1063268 | 3.5 | 79 | 121 | 0.13 | 20 |
| 1063649 | 3.6 | 141 | 207 | 0.20 | 20 |
| 1063655 | 3.2 | 89 | 170 | 0.17 | 24 |
| 1063734 | 3.4 | 62 | 121 | 0.15 | 20 |
| 1064096 | 3.1 | 74 | 163 | 0.17 | 28 |
| 1064313 | 2.8 | 117 | 186 | 0.16 | 27 |

### Hematology Assays

[0431] Blood obtained from mouse groups at week 6 were sent to IDEXX BioResearch for measurement of blood cell counts. Counts taken include red blood cell (RBC) count, white blood cell (WBC) count, hemoglobin (HGB), hematocrit (HCT), mean corpuscular volume (MCV), mean corpuscular hemoglobin (MCH), mean corpuscular hemoglobin concentration (MCHC), and individual white blood cell counts, such as that of monocytes (MON), neutrophils (NEU), lymphocytes (LYM), eosinophils (EOS), reticulocytes (RETIC) and platelets (PLT). The results are presented in the tables below. Ionis oligonucleotides that caused changes in the blood cell count outside the expected range for modified oligonucleotides were excluded in further studies.

TABLE 91
Blood Cell Count in Sprague-Dawley Rats

| ION | RBC | WBC | HGB | HCT | MCV | MCH | MCHC |
|---|---|---|---|---|---|---|---|
| No. | (M/uL) | (K/uL) | (g/dL) | (%) | (fL) | (pg) | (g/dL) |
| Saline | 8 | 14 | 15 | 47 | 57 | 19 | 33 |
| 1062428 | 7 | 20 | 14 | 42 | 61 | 20 | 32 |
| 1062641 | 7 | 22 | 14 | 41 | 57 | 19 | 33 |
| 1062835 | 9 | 15 | 16 | 47 | 54 | 18 | 33 |
| 1062937 | 8 | 17 | 13 | 41 | 53 | 17 | 33 |
| 1063268 | 7 | 15 | 13 | 39 | 55 | 18 | 32 |
| 1063649 | 7 | 12 | 13 | 41 | 54 | 18 | 33 |
| 1063655 | 8 | 12 | 14 | 43 | 55 | 18 | 33 |
| 1063734 | 8 | 18 | 15 | 45 | 55 | 18 | 33 |
| 1064096 | 7 | 21 | 13 | 40 | 56 | 18 | 33 |
| 1064313 | 8 | 15 | 14 | 42 | 54 | 18 | 33 |

TABLE 92
Blood Cell Count in Sprague-Dawley Rats

| ION | MON | NEU | LYM | EOS | RETIC | PLT |
|---|---|---|---|---|---|---|
| No. | (/uL) | (/uL) | (/uL) | (/uL) | (K/uL) | (K/uL) |
| Saline | 670 | 1296 | 11523 | 130 | 328 | 737 |
| 1062428 | 2742 | 602 | 16053 | 68 | 373 | 457 |
| 1062641 | 2344 | 1951 | 17379 | 56 | 194 | 567 |
| 1062835 | 1598 | 2239 | 10485 | 200 | 289 | 939 |
| 1062937 | 1856 | 1390 | 13361 | 48 | 244 | 604 |
| 1063268 | 821 | 1203 | 12352 | 88 | 132 | 611 |
| 1063649 | 1013 | 1048 | 9398 | 68 | 218 | 663 |
| 1063655 | 1113 | 1635 | 9214 | 115 | 207 | 728 |
| 1063734 | 1785 | 899 | 15240 | 42 | 276 | 702 |
| 1064096 | 1754 | 1126 | 17788 | 158 | 259 | 620 |
| 1064313 | 1268 | 638 | 12587 | 69 | 231 | 428 |

### Kidney Function

[0432] To evaluate the effect of Ionis oligonucleotides on kidney function, urinary levels of total protein and creatinine were measured using an automated clinical chemistry analyzer (Hitachi Olympus AU400c, Melville, N.Y.). The ratios of total protein to creatinine (P/C ratio) are presented in the Table below. Ionis oligonucleotides that caused changes in the levels of the ratio outside the expected range for modified oligonucleotides were excluded in further studies.

TABLE 93
Total protein to creatinine ratio
in Sprague-Dawley rats

| | URINE |
|---|---|
| ION | P/C |
| NO. | ratio |
| Saline | 1.0 |
| 1062428 | 5.5 |
| 1062641 | 7.4 |
| 1062835 | 11.1 |
| 1062937 | 7.4 |
| 1063268 | 4.4 |
| 1063649 | 3.8 |
| 1063655 | 7.7 |
| 1063734 | 5.4 |
| 1064096 | 5.6 |
| 1064313 | 9.1 |

### Body and Organ Weights

[0433] Liver, heart, spleen and kidney weights were measured at the end of the study and are presented in the table below. Terminal body weight was measured prior to necropsy. Ionis oligonucleotides that caused any changes in organ weights outside the expected range for modified oligonucleotides were excluded from further studies.

TABLE 94
Body and Organ weights

| | Body | | | |
|---|---|---|---|---|
| ION | Weight | Liver | Kidney | Spleen |
| No. | (g) | (g) | (g) | (g) |
| Saline | 467 | 19 | 3.4 | 0.9 |
| 1062428 | 348 | 15 | 2.6 | 1.1 |
| 1062641 | 352 | 18 | 3.0 | 2.4 |
| 1062835 | 379 | 17 | 3.4 | 1.4 |
| 1062937 | 360 | 15 | 3.3 | 1.4 |
| 1063268 | 418 | 18 | 3.0 | 1.1 |
| 1063649 | 385 | 19 | 3.6 | 1.7 |
| 1063655 | 398 | 21 | 4.0 | 2.5 |
| 1063734 | 341 | 17 | 2.9 | 1.5 |
| 1064096 | 397 | 20 | 4.2 | 3.7 |
| 1064313 | 381 | 20 | 4.4 | 2.8 |

### Example 13: Effect of Modified Oligonucleotides on Human FOXP3 Expression in a Humanized PBMC Mouse Model

[0434] Humanized PBMC mice obtained from Jackson Laboratory (hu-PBMC-NSG). NOD.Cg-Prkdcscid Il2rgtm1Wjl/SzJ mice were engrafted with human PBMCs to generate the hu-PBMC-NSG model. Mice were treated with modified oligonucleotides selected from studies described above and evaluated for changes in the levels of various plasma chemistry markers as well as mRNA.

### Treatment

[0435] Groups of 4 female hu-PBMC-NSG mice (obtained from Jackson Laboratory) were injected subcutaneously daily (for a total of 4 treatments) with 25 mg/kg of modified oligonucleotides. Mice were treated with modified oligonucleotide in groups of 4. One additional group of 8 female huPBMC mice was injected with PBS. Mice were euthanized on day 4 post start of treatment (24 hours following the final administration).

### Plasma Chemistry Markers

[0436] To evaluate the effect of modified oligonucleotides on liver function, plasma levels of blood urea nitrogen (BUN), albumin, alanine aminotransferase (ALT), aspartate aminotransferase (AST), total bilirubin (TBIL), and albumin (ALB) were measured using an automated clinical chemistry analyzer (Hitachi Olympus AU400c, Melville, N.Y.). The results are presented in the Table below. Modified oligonucleotides that caused changes in the levels of any of the liver or kidney function markers outside the expected range for modified oligonucleotides were excluded in further studies.

TABLE 95
Plasma chemistry markers in female huPBMC mice

| ION | Albumin | ALT | AST | TBIL | BUN |
|---|---|---|---|---|---|
| NO. | (g/dL) | (U/L) | (U/L) | (mg/dL) | (mg/dL) |
| PBS | 3.1 | 26 | 73 | 0.24 | 22 |
| 549148 | 3.1 | 36 | 78 | 0.19 | 21 |
| 1062413 | 3.0 | 58 | 115 | 0.20 | 24 |
| 1062428 | 3.0 | 80 | 118 | 0.22 | 19 |
| 1062641 | 2.9 | 68 | 163 | 0.27 | 21 |
| 1063268 | 3.1 | 40 | 85 | 0.45 | 20 |
| 1063649 | 3.1 | 29 | 63 | 0.23 | 20 |
| 1063734 | 3.0 | 131 | 257 | 0.23 | 19 |
| 1064096 | 3.0 | 31 | 122 | 0.19 | 23 |

### Body Weights

[0437] Body weights of hu-PBMC-NSG mice were measured on the day the mice were sacrificed, and the average body weight for each group is presented in the Table below. Modified oligonucleotides that caused any changes in organ weights outside the expected range for modified oligonucleotides were excluded from further studies.

TABLE 96
Body and organ weights (in grams)

| | Body |
|---|---|
| ION | Weight |
| NO. | (g) |
| PBS | 21 |
| 549148 | 21 |
| 1062413 | 22 |
| 1062428 | 21 |
| 1062641 | 22 |
| 1063268 | 23 |
| 1063649 | 22 |
| 1063734 | 22 |
| 1064096 | 20 |

### RNA Analysis

[0438] Splenocytes and lymph nodes were extracted for RNA analysis. Splenocytes were isolated from the spleens by mechanical disruption in tissue dissociation tubes (Mitelnyi) on gentleMACS dissociator (Mitelnyi). Primer probe sets RTS35925 described above and RTS35988 (forward sequence, CAAATGGTGTCTGCAAGTGG, designated herein as SEQ ID NO: 3248; reverse sequence, CTCTGGAGGAGACATTGTGC, designated herein as SEQ ID NO: 3249; probe sequence, CCTGGCAGTGCTTGAGGAAGTCC, designated herein as SEQ ID NO: 3250) were used to measure human Foxp3 RNA levels in separate PCRs. Results are presented as percent change of RNA, relative to PBS control, normalized to either human GAPDH and human CD4. Human GAPDH was amplified using primer probe set RTS104 (forward sequence, GAAGGTGAAGGTCGGAGTC, designated herein as SEQ ID NO: 3251; reverse sequence, GAAGATGGTGATGGGATTTC, designated herein as SEQ ID NO: 3252; probe sequence, CAAGCTTCCCGTTCTCAGCC, designated herein as SEQ ID NO: 3253). Human CD4 was amplified using ABI primer probe set Hs01058407_m1.

[0439] As presented in the table below, treatment with Ionis modified oligonucleotides resulted in reduction of Foxp3 RNA in comparison to the PBS control. Results are presented in the tables below as percent control of the amount of Foxp3 mRNA relative to PBS control (% control).

TABLE 97
Modified oligonucleotide mediated inhibition of human Foxp3 RNA expression in huPBMC model

| | Splenocytes | | | | Lymph Node | | | |
|---|---|---|---|---|---|---|---|---|
| | Normalized to GAPDH | | Normalized to CD4 | | Normalized to GAPDH | | Normalized to CD4 | |
| | Foxp3 | Foxp3 | Foxp3 | Foxp3 | Foxp3 | Foxp3 | Foxp3 | Foxp3 |
| | Levels | Levels | Levels | Levels | Levels | Levels | Levels | Levels |
| ION | (RTS35925) | (RTS35988) | (RTS35925) | (RTS35988) | (RTS35925) | (RTS35988) | (RTS35925) | (RTS35988) |
| No. | % control | % control | % control | % control | % control | % control | % control | % control |
| PBS | 100 | 100 | 100 | 100 | 100 | 100 | 100 | 100 |
| 549148 | 79 | 87 | 84 | 93 | 91 | 91 | 107 | 102 |
| 1062413 | 34 | 42 | 55 | 69 | 86 | 82 | 91 | 89 |
| 1062428 | 65 | 73 | 80 | 96 | 60 | 58 | 89 | 89 |
| 1062641 | 31 | 39 | 52 | 64 | 36 | 38 | 70 | 70 |
| 1063268 | 61 | 75 | 56 | 70 | 60 | 55 | 97 | 89 |
| 1063649 | 55 | 68 | 64 | 80 | 58 | 60 | 97 | 97 |
| 1063734 | 34 | 43 | 55 | 66 | 82 | 74 | 106 | 94 |
| 1064096 | 65 | 79 | 63 | 77 | 83 | 79 | 107 | 93 |

### Flow Cytometry

[0440] Foxp3 protein levels were measured in regulatory T-cells using flow cytometry. After incubation with modified oligonucleotides, CD4⁺ T-cells were stained with fluorescently-labeled CD3, CD4, Helios and FOXP3 antibodies (Biolegend) using TrueNuclear Transcription Factor Buffer Set (Biolegend). Regulatory T-cells were gated as CD3⁺CD4⁺Helios⁺ cells and Foxp3 protein levels were quantified using median fluorescent intensity of Foxp3 antibody stain.

TABLE 98
Modified oligonucleotide mediated inhibition
of human Foxp3 protein levels in huPBMC model

| | % control |
|---|---|
| ION | Foxp3 |
| NO. | protein |
| PBS | 100 |
| 549148 | 74 |
| 1062413 | 63 |
| 1062428 | 59 |
| 1062641 | 48 |
| 1063268 | 53 |
| 1063649 | 22 |
| 1063734 | 33 |
| 1064096 | 54 |

### Example 14: Dose-Dependent Inhibition of Human Foxp3 mRNA and Protein Levels in CD4 T-Cells Derived from Hu-PBMC-NSG Mice by Modified Oligonucleotide

[0441] Human CD4⁺ T-cells were isolated from splenocytes of humanized PBMC mice (hu-PBMC-NSG, Jackson Laboratory) through a combination of initial purification using the Human Easysep CD4 T-cell purification kit (Stemcell Technologies), followed by a negative selection using the Mouse Easysep CD4 T-cell purification kit (Stemcell Technologies) to enrich the human population only. Purified human CD4⁺ T-cells were cultured in Immunocult-XT T-cell expansion media (Stemcell Technologies) supplemented with 30 ng/mL of human recombinant IL-2 (Stemcell Technologies). CD4⁺ T-cells were treated ex-vivo with modified oligonucleotides by free uptake in a dose response study for 72 hours. Cells were activated for 24 h in the presence of Imunocult human CD3/CD28/CD2 T-cell activator (Stemcell Technologies). Cells were harvested and evaluated for changes in the levels of Foxp3 mRNA.

[0442] Primer probe set RTS35988 was used to measure human Foxp3 RNA levels. Foxp3 RNA levels are normalized to either human GAPDH or to human CD4. Human GAPDH was amplified using primer probe set RTS104. Human CD4 was amplified using ABI primer probe set Hs01058407_m1. Results are presented in the tables below as percent control of the amount of Foxp3 mRNA relative to PBS control (% control).

[0443] Foxp3 protein levels were measured in regulatory T-cells using flow cytometry. After incubation with modified oligonucleotides, CD4⁺ T-cells were stained with fluorescently-labeled CD3, CD4, Helios and FOXP3 antibodies (Biolegend) using TrueNuclear Transcription Factor Buffer Set (Biolegend). Regulatory T-cells were gated as CD3⁺CD4⁺Helios⁺ cells and Foxp3 protein levels were quantified using median fluorescent intensity of Foxp3 antibody stain.

TABLE 99
Modified oligonucleotide mediated inhibition of human Foxp3
RNA expression in CD4 T-cells from huPBMC
model (normalized to GAPDH)

| | % control - RTS35925 normalized to GAPDH | | | | | |
|---|---|---|---|---|---|---|
| ION | 10 | 2.5 | 0.63 | 0.16 | 0.04 | IC50 |
| No. | μM | μM | μM | μM | μM | (μM) |
| 1062428 | 47 | 48 | 48 | 75 | 85 | 2.6 |
| 1062641 | 57 | 65 | 71 | 75 | 99 | 16.9 |
| 1062835 | 59 | 65 | 70 | 85 | 80 | 46.3 |
| 1062937 | 39 | 46 | 61 | 62 | 80 | 1.8 |
| 1063268 | 38 | 46 | 60 | 66 | 86 | 1.9 |
| 1063649 | 50 | 68 | 77 | 91 | 113 | 8.7 |
| 1063655 | 33 | 35 | 60 | 80 | 103 | 1.5 |
| 1063734 | 13 | 24 | 34 | 54 | 86 | 0.3 |
| 1064096 | 54 | 52 | 72 | 79 | 91 | 8.4 |
| 1064313 | 61 | 70 | 77 | 84 | 102 | 24.7 |
| 792169 | 138 | 87 | 87 | 71 | 81 | >10 |

TABLE 100
Modified oligonucleotide mediated inhibition of human
Foxp3 RNA expression in CD4 T-cells from huPBMC
model (normalized to CD4)

| | % control - RTS35925 normalized to CD4 | | | | | |
|---|---|---|---|---|---|---|
| ION | 10 | 2.5 | 0.63 | 0.16 | 0.04 | IC50 |
| No. | μM | μM | μM | μM | μM | (μM) |
| 1062428 | 48 | 47 | 46 | 70 | 90 | 2.3 |
| 1062641 | 50 | 60 | 64 | 70 | 86 | 8.5 |
| 1062835 | 59 | 62 | 66 | 79 | 79 | 40.6 |
| 1062937 | 41 | 44 | 55 | 61 | 74 | 1.5 |
| 1063268 | 41 | 45 | 61 | 66 | 82 | 2.2 |
| 1063649 | 55 | 62 | 75 | 87 | 110 | 9.9 |
| 1063655 | 34 | 37 | 60 | 75 | 97 | 1.5 |
| 1063734 | 13 | 23 | 33 | 51 | 82 | 0.2 |
| 1064096 | 46 | 49 | 65 | 75 | 90 | 3.8 |
| 1064313 | 59 | 65 | 73 | 79 | 97 | 20.6 |
| 792169 | 139 | 90 | 87 | 73 | 80 | >10 |

TABLE 101
Dose-dependent inhibition of human Foxp3 protein expression
by modified oligonucleotides in regulatory T-cells

| | % control | | | | | |
|---|---|---|---|---|---|---|
| ION | 10 | 2.5 | 0.63 | 0.16 | 0.04 | IC₅₀ |
| No. | μM | μM | μM | μM | μM | (μM) |
| 1062428 | 32 | 45 | 53 | 73 | 93 | 1.4 |
| 1062641 | 54 | 65 | 74 | 91 | 102 | 11.0 |
| 1062835 | 60 | 69 | 77 | 89 | 100 | 20.9 |
| 1062937 | 44 | 46 | 59 | 72 | 88 | 2.6 |
| 1063268 | 46 | 57 | 69 | 87 | 100 | 5.5 |
| 1063649 | 33 | 43 | 58 | 81 | 101 | 1.8 |
| 1063655 | 26 | 31 | 49 | 72 | 90 | 0.8 |
| 1063734 | 12 | 16 | 28 | 50 | 80 | 0.2 |
| 1064096 | 31 | 40 | 58 | 78 | 92 | 1.5 |
| 1064313 | 50 | 57 | 68 | 84 | 98 | 6.5 |
| 792169 | 105 | 94 | 97 | 106 | 107 | >10 |

### Example 15: Dose-Dependent Inhibition of Human Foxp3 in SUP-M2 Cells by Modified Oligonucleotide

[0444] Modified oligonucleotides were tested for their effect on Foxp3 mRNA level in vitro in SUP-M2 cells. Cultured SUP-M2 cells at a density of 35,000 cells per mL, were transfected using electroporation with modified oligonucleotides diluted to concentrations of 10 μM, 2.5 μM, 0.63 μM, 0.16 μM and 0.04 μM. After a treatment period of approximately 48 hours, RNA was isolated from the cells and Foxp3 mRNA levels were measured by quantitative real-time RTPCR. Human primer probe sets RTS35925 and RTS35988 were both used to measure mRNA levels in separate RTPCR reactions. Foxp3 mRNA levels were adjusted according to total RNA content, as measured by RIBOGREEN®, as well as adjusted to GAPDH levels measured by human primer-probe set RTS104. Results are presented in the tables below as percent control of the amount of Foxp3 mRNA relative to untreated control cells (% UTC).

TABLE 102
Dose-dependent inhibition of human Foxp3 mRNA
expression by modified oligonucleotides in SUP-M2 cells

| | % UTC - RTS35925 normalized to GAPDH | | | | | |
|---|---|---|---|---|---|---|
| ION | 10 | 2.5 | 0.63 | 0.16 | 0.04 | IC₅₀ |
| No. | μM | μM | μM | μM | μM | (μM) |
| 1062428 | 7 | 18 | 48 | 84 | 95 | 0.6 |
| 1062641 | 10 | 30 | 61 | 92 | 101 | 0.9 |
| 1062835 | 17 | 42 | 77 | 94 | 126 | >10 |
| 1062937 | 24 | 60 | 112 | 144 | 134 | 1.6 |
| 1063268 | 9 | 24 | 52 | 71 | 84 | 0.9 |
| 937101 | 43 | 50 | 58 | 64 | 69 | 1.8 |
| 549144 | 52 | 45 | 56 | 74 | 82 | 0.3 |
| 1063649 | 3 | 11 | 26 | 85 | 102 | 0.3 |
| 1063655 | 10 | 24 | 61 | 98 | 119 | 0.5 |
| 1063734 | 2 | 12 | 33 | 74 | 124 | 0.1 |
| 1064096 | 4 | 19 | 48 | 95 | 110 | 0.5 |
| 1064313 | 20 | 44 | 83 | 90 | 112 | 2.7 |
| 937101 | 49 | 70 | 69 | 72 | 83 | >10 |
| 549144 | 52 | 66 | 79 | 83 | 94 | >10 |

TABLE 103
Dose-dependent inhibition of human Foxp3 mRNA expression by
modified oligonucleotides in SUP-M2 cells

| | % UTC - RTS35925 normalized to Ribogreen | | | | | |
|---|---|---|---|---|---|---|
| ION | 10 | 2.5 | 0.63 | 0.16 | 0.04 | IC₅₀ |
| No. | μM | μM | μM | μM | μM | (μM) |
| 1062428 | 9 | 22 | 47 | 81 | 91 | 0.7 |
| 1062641 | 15 | 42 | 71 | 94 | 108 | >10 |
| 1062835 | 25 | 49 | 89 | 102 | 125 | 2.8 |
| 1062937 | 19 | 45 | 72 | 95 | 97 | >10 |
| 1063268 | 14 | 35 | 70 | 85 | 110 | >10 |
| 937101 | 67 | 83 | 95 | 110 | 120 | >10 |
| 549144 | 68 | 57 | 69 | 81 | 91 | >10 |
| 1063649 | 4 | 13 | 30 | 82 | 88 | 0.4 |
| 1063655 | 13 | 29 | 68 | 102 | 111 | 0.2 |
| 1063734 | 3 | 16 | 39 | 80 | 129 | 0.4 |
| 1064096 | 6 | 21 | 51 | 92 | 99 | 0.8 |
| 1064313 | 25 | 53 | 91 | 93 | 115 | >10 |
| 937101 | 80 | 113 | 107 | 111 | 121 | 1.7 |
| 549144 | 69 | 91 | 101 | 99 | 106 | >10 |

TABLE 104
Dose-dependent inhibition of human Foxp3 mRNA
expression by modified oligonucleotides in SUP-M2 cells

| | % UTC - RTS35988 normalized to GAPDH | | | | | |
|---|---|---|---|---|---|---|
| ION | 10 | 2.5 | 0.63 | 0.16 | 0.04 | IC₅₀ |
| No. | μM | μM | μM | μM | μM | (μM) |
| 1062428 | 8 | 18 | 56 | 82 | 94 | 0.7 |
| 1062641 | 11 | 30 | 60 | 80 | 97 | 1.1 |
| 1062835 | 18 | 47 | 72 | 99 | 114 | 2.4 |
| 1062937 | 24 | 71 | 102 | 150 | 144 | 2.2 |
| 1063268 | 9 | 33 | 47 | 70 | 82 | >10 |
| 937101 | 49 | 57 | 54 | 62 | 62 | >10 |
| 549144 | 52 | 64 | 73 | 77 | 91 | >10 |
| 1063649 | 3 | 10 | 38 | 76 | 112 | 0.2 |
| 1063655 | 9 | 21 | 46 | 76 | 115 | 0 |
| 1063734 | 4 | 12 | 29 | 72 | 93 | 0.3 |
| 1064096 | 8 | 22 | 53 | 82 | 104 | 0.5 |
| 1064313 | 25 | 49 | 74 | 92 | 104 | 2.3 |
| 937101 | 56 | 59 | 69 | 74 | 72 | 1.2 |
| 549144 | 69 | 71 | 77 | 88 | 93 | 0.4 |

TABLE 105
Dose-dependent inhibition of human Foxp3 mRNA expression
by modified oligonucleotides in SUP-M2 cells

| | % UTC - RTS35988 normalized to Ribogreen | | | | | |
|---|---|---|---|---|---|---|
| ION | 10 | 2.5 | 0.63 | 0.16 | 0.04 | IC₅₀ |
| No. | μM | μM | μM | μM | μM | (μM) |
| 1062428 | 10 | 23 | 53 | 78 | 91 | 0.7 |
| 1062641 | 17 | 42 | 67 | 82 | 101 | 1.8 |
| 1062835 | 26 | 55 | 84 | 104 | 116 | 1.8 |
| 1062937 | 20 | 54 | 65 | 98 | 106 | 1.8 |
| 1063268 | 14 | 48 | 64 | 90 | 108 | 2.3 |
| 937101 | 77 | 96 | 90 | 109 | 111 | 4.9 |
| 549144 | 67 | 84 | 93 | 90 | 102 | >10 |
| 1063649 | 4 | 12 | 43 | 76 | 97 | 0.2 |
| 1063655 | 12 | 26 | 51 | 81 | 110 | 0 |
| 1063734 | 5 | 16 | 35 | 78 | 97 | 0.3 |
| 1064096 | 10 | 26 | 58 | 82 | 98 | 0.5 |
| 1064313 | 32 | 60 | 82 | 96 | 107 | 2.3 |
| 937101 | 93 | 98 | 109 | 116 | 108 | 1.2 |
| 549144 | 93 | 99 | 100 | 106 | 106 | 0.4 |

The application's sequence listing, which the Patent Office published only in electronic form, follows.

SEQUENCE LISTING (3253 sequences)

SEQ ID NO: 1 - RNA, 2397 nt, Homo sapiens
  source 1..2397: mol_type = mRNA
gcacacactcatcgaaaaaaatttggattattagaagagagaggtctgcggcttccacaccgtacagcgtggtttttcttctcggtataaaagcaaagttgtttttgatacgtgacagtttcccacaagccaggctgatccttttctgtcagtccacttcaccaagcctgcccttggacaaggacccgatgcccaaccccaggcctggcaagccctcggccccttccttggcccttggcccatccccaggagcctcgcccagctggagggctgcacccaaagcctcagacctgctgggggcccggggcccagggggaaccttccagggccgagatcttcgaggcggggcccatgcctcctcttcttccttgaaccccatgccaccatcgcagctgcagctgcccacactgcccctagtcatggtggcaccctccggggcacggctgggccccttgccccacttacaggcactcctccaggacaggccacatttcatgcaccagctctcaacggtggatgcccacgcccggacccctgtgctgcaggtgcaccccctggagagcccagccatgatcagcctcacaccacccaccaccgccactggggtcttctccctcaaggcccggcctggcctcccacctgggatcaacgtggccagcctggaatgggtgtccagggagccggcactgctctgcaccttcccaaatcccagtgcacccaggaaggacagcaccctttcggctgtgccccagagctcctacccactgctggcaaatggtgtctgcaagtggcccggatgtgagaaggtcttcgaagagccagaggacttcctcaagcactgccaggcggaccatcttctggatgagaagggcagggcacaatgtctcctccagagagagatggtacagtctctggagcagcagctggtgctggagaaggagaagctgagtgccatgcaggcccacctggctgggaaaatggcactgaccaaggcttcatctgtggcatcatccgacaagggctcctgctgcatcgtagctgctggcagccaaggccctgtcgtcccagcctggtctggcccccgggaggcccctgacagcctgtttgctgtccggaggcacctgtggggtagccatggaaacagcacattcccagagttcctccacaacatggactacttcaagttccacaacatgcgaccccctttcacctacgccacgctcatccgctgggccatcctggaggctccagagaagcagcggacactcaatgagatctaccactggttcacacgcatgtttgccttcttcagaaaccatcctgccacctggaagaacgccatccgccacaacctgagtctgcacaagtgctttgtgcgggtggagagcgagaagggggctgtgtggaccgtggatgagctggagttccgcaagaaacggagccagaggcccagcaggtgttccaaccctacacctggcccctgacctcaagatcaaggaaaggaggatggacgaacaggggccaaactggtgggaggcagaggtggtgggggcagggatgataggccctggatgtgcccacagggaccaagaagtgaggtttccactgtcttgcctgccagggcccctgttcccccgctggcagccaccccctcccccatcatatcctttgccccaaggctgctcagaggggccccggtcctggccccagcccccacctccgccccagacacaccccccagtcgagccctgcagccaaacagagccttcacaaccagccacacagagcctgcctcagctgctcgcacagattacttcagggctggaaaagtcacacagacacacaaaatgtcacaatcctgtccctcactcaacacaaaccccaaaacacagagagcctgcctcagtacactcaaacaacctcaaagctgcatcatcacacaatcacacacaagcacagccctgacaacccacacaccccaaggcacgcacccacagccagcctcagggcccacaggggcactgtcaacacaggggtgtgcccagaggcctacacagaagcagcgtcagtaccctcaggatctgaggtcccaacacgtgctcgctcacacacacggcctgttagaattcacctgtgtatctcacgcatatgcacacgcacagccccccagtgggtctcttgagtcccgtgcagacacacacagccacacacactgccttgccaaaaataccccgtgtctcccctgccactcacctcactcccattccctgagccctgatccatgcctcagcttagactgcagaggaactactcatttatttgggatccaaggcccccaacccacagtaccgtccccaataaactgcagccgagctccccacaaaaaaaaaaaaaaaa

SEQ ID NO: 2 - DNA, 14679 bp, Homo sapiens
  source 1..14679: mol_type = genomic DNA
tctctttccctggcatttcccatccacacatagagcttcagattctctttctttccccagagaccctcaaatatcctctcactcacagaatggtgtctctgcctgcctcgggttggccctgtgatttattttagttcttttcccttgttttttttttttcaaactctatacacttttgttttaaaaactgtggtttctcatgagccctattatctcattgatacctctcacctctgtggtgaggggaagaaatcatattttcagatgactcgtaaagggcaaagaaaaaaacccaaaatttcaaaatttccgtttaagtctcataatcaagaaaaggagaaacacagagagagagaaaaaaaaaactatgagaacccccccccaccccgtgattatcagcgcacacactcatcgaaaaaaatttggattattagaagagagaggtctgcggcttccacaccgtacagcgtggtttttcttctcggtataaaagcaaagttgtttttgatacgtgacagtttcccacaagccaggctgatccttttctgtcagtccacttcaccaaggtgagtgtccctgctctcccctaccagatgtgggccccattggaggagatggcagggaggtaggcacggcgggggggtcaggggccctctggtacagtgggatgtacccagctaccgtgattccagccaggtaaggtctttaaaaaaataataatagaataaatggcagaagacttaaaggtgaagtacttaatgcatgggcaggggcaaaaataaatgaattcatcaattgatacgtagatggataggatttttaaaatatgtcagctgccagtctttatggatttcagagctttgaacaacttgaaatgctgtccaggtgcaactgaaaatttcaactgcatctctctcatctctttgtctcttagctcttgatgcctctcatccttctctgtctctctgctcaccctgtcttgctcttttacatgtttctctgcctctctttctcccgccatctgtctgtcgctacactcagactctctttccccgcatctctcctggcctctgaccatctcccctatctctgtctcctccatcttgaccacactccatcgatctcctttcctccatctctcccgctctcttttcttgccttcccccacctgccttcccagccagcatccagcctagagctttgtacacagctggcgtttaataatagtaatgtcgccgaggacctttacattttatgagagtgagcatcagttctgttcaccctagtagcaggaggattgcaaggtgccggggcaagctgagcacttaactgaactttgcttgtatcgctttagaggagacccttggggcgggggggcagggagcacttcacaccattgtcaaccgtagtttagctgtgtggacctaccccaggactgcatgtgtgtgaccagagtccatattcaggaagcaaacaggttgttcagggctggggtgagctcgattctgcaggcttagcacagcgtttggcacaaagtaagtgctcacgaagtgttagctattagtatttctgtaaccaaattagaatcatgctatatattggttttgttcctgctttattcaattaacagtagtgtttttgaagcttactaaaaattgtttgaacacatgatctttcatgatggacaagactgtcctcacatcagcatgaactttgattgatttgaccaagtgccgattgttggacattccggttgtttctcgtttttttctataaacatccctgactgcttccttggattcctgaaaagggagttgctggggcaaagggggcgtgcatttttaaagtttatgaccctctctgctaattctccttccaaaaggttgtcctattttatgctccctctacttaagctaaccctaggtgagtattattatgttttaattatttcccaacatgacaggtaagaaaaacacattatcacattgttgaaatttgcatcttgtgattacttttactattcattggccattcatgcttttttttttttttttttttggttgtctggtcatgtccttactcctaatagggtgttcatcttatttttcccttattgatttgccacagctctttatttggaatggttattaacctttcatcagccattacatatatagcaaatattttccccaattcatcatttgctttttttctatttgtttatggtgttttttgtgatgcttatgatggttttatacagtcaaataggttagtctttttttctgtggcttctgtctctggttttgtgcttagaaagtcctttcctacttgaaaatgagataaatgttcacctatgttggcttctagtctcttttatggcttcattttttccatttactatagaggttaagagtgtgggtactggagccagactgtctgggacaaacccagcgtcaccccaagccctatgtgtgatttttagccaggcacttaacctctccatacctccatttcctcatatgtactgcaatggttataatagtaccttcctcaggagtctttgtttagattaaaatttttaaccacagtaaatacttagcacaaggcctgacacacaataaacccaagatcagcattaggtgttaaaacttatatcttgaatggatctgggcattttagggtatatgatgatggtgacatttcaaactgggcagggaggggttgttgggataatggactgactattcactcaataactttatcttctccctaattatctcagacacatttgttaaaccatactccatggtcctccagtttgaaatgccacattcatcacaaattcagttctctccatatgtgggtccatgtccaagctttctattctgttctcttccccagtatctgttcttataccagggccacactgttttgctgattgttgctttgcaatacaattcaatacccagccatgggtgtccctggcaccttgcccttctttattcttgattatttcaggcagcatcagttgaaccagccagagaccagcaaatgttcttatttgaggcaatcctcctctcgcacacatgcactctggctctccatgcatgtgtccatttctctcaatgtctctcactatctcttgttctctcttgctcgctctttgtgtgtgtctctttgtctctatgtatccctatctctcagccagtcccctggatagaggggcaattgtcaacttgaagccctgcagacacctaatgacttaaccagacagcgtagaagggccctggcccttgtctactccacgcctctccgtgctcagtgtagaagggcaaattgaagaccagagatctcagggcctcaccgaaatgcagcggcagagttgaaatccaagcctagatctcaggactctaggtgggaccctggttctggctctctccccaactgaaggcctcagtttacccctcagcacccagaagggggaaggggaacctgggctaccattcccccttctgccttctcacacgttggaccccaacttcccacaggttggacgatccacgatcacagtgtggggcccagcctcacaagagctgggctaggtgaggccccggactccataggtcaggaggcctagttggccagagcgtggtgatgatggaggcatgtcagtcagtcaggctgtgtgtccccagagctggtgctggtccccgaaaaccttgattgtggggcccctctagagagtctgatgatgggctctgtattggcgaaggctgaggcttttccagctccccccatgaggcccagaccaaaggcacaccagcctcaacctcctcctccccctgttgccatctctggcggagtggccatgtatttgggaacgttgttccagagtggacagggagactgaggccctagggaggctggctctgtttccaggcctggtaggcaagaggccctatgaagcagcaagctgcctgactttcagatggttccaaggagtttggacaccagggacactggcctacacatactgagactttgggaccgtagaccccacagtctgtggttttgagattctaggatcctttaaatctaagaaatgctgttctatgattctgaggtcctggtgttatactatttgaagaccccaggggtcccagtatctgtggagcctgcctggcactctcagagcttcaaacctgggtcctctccacaacccaagaagggccaggtcttcagagctaggggcttgtcatagtggccagatggacatcacctaccacatccaccagcacccatgtcaccccacctgggccaagcctgctgcaggacagggcagccagttctcggaacgaaacctgtggggtggggtatctgccctcttctcttcctccgtggtgtcgatgaagcccggcgcatccggccgccatgacgtcaatggcggaaaaatctgggcaagtcgggggctgtgacaacagggcccagatgcagaccccgatatgaaaacataatctgtgtcccagaaacatcccccattcagcttctgagaaacccagtcagaaagggacgtcccaacagacagtgcaggaagccggctgcccagcccggccctctaggtcctctacccccagacagatcatctccatgtccctgtctgagaatgtatctatgctttgctgagtcaggccatcccacatgtgtttggggagaattcttagctctggccaagtgtccaggcagcttcagaagtgaccacaggccagccacatgggccaggccagagtggtggaaaacatccatttgcaccgaaatcggtattagtttgttctggctgctataacaaagtaccacaactgagtggcttcagcaacagaaattgatcatctcacagttctggaggccagagtccaagatcaaggtgttgccagggttggttccttctgggggccataagggagaagctgctccaggcctctcccccagcttctggtggttgctggcaatctttgttatttcttggcttgaaggagcatcaccccatctctggcttcattcattcactcaccttctcatctcaccagtgctctcccaggcccttgttcggagcctccacagacccacactcctgtttctcacgcagtaatgttctaagcccccaggagactaagaacttaatacctggattctcacactcatctccctcagcaccacagctctgacaaccacccccaggaggtgacagcaaagaaaggaaggagcaactgctcccccagaacccttctatactcccccgggctgctctcagcagctgtgtgcccaactcagtgctgtgaggtggaacggggagatggagacacacacacacacacaccagagagtttataaaatgtgcacacggaaacacttcctaaagaaagaagtggagttctcaagtcactatgggactacggaactcggcatctgagcatccccttctgtataatggggttggctgggcagtcccttccagctctggcttcctctcagaccaggattataggatcctgaaaagccagtgcttccctcagggagtggaaggttctggggctcagcagggggcccggagccattgtggagggctttcaaggtgaggacaatagaagagcaggtcttgcgtggcttggacagggaaagaggagaaggagtgggcatttgaggcagggggtgtagcatgagccaggcttgagggccagaaattggggtgaactctgatgggggctgggtagagaagcttctacaggccccagctcaagagaccccatctctcctcctctctgtcacttgccatgctggatccgtgcatgatcacactcctggactcgcctccttgccctgagatccagacccccgtattcagctgccccctcagctcctccactcacatatttaatgccagactcttcatgtctatctacacctgcacttttgcacccaatccaactccccgccatgtcccccatctcaggtaatgtcagctcggtccttccagctgctcaagctaaaacccatgtcactttgactctccctcttgcccactacatccaagctgctagcactgctcctgatccagcttcagattaagtctcagaatctacccacttctcgccttctccactgccaccagcccattctgtgccagcatcatcacttgccaggactgttacaatagcctcctcactagccccactcacagcagccagatgaatcttttgagtccatgcctagtcactggggcaaaataggactccgaggagaaagtccgagaccagctccggcaagatgagcaaacacagcctgtgcagggtgcagggagggctagaggcctgaggcttgaaacagctctcaagtggagggggaaacaaccattgccctcatagaggacacatccacaccagggctgtgctagcgtgggcaggcaagccaggtgctggacctctgcacgtggggcatgtgtgggtatgtacatgtacctgtgttcttggtgtgtgtgtgtgtgtgtgtgtgtgtgtgtgtctagagctggggtgcaactatggggcccctcgggacatgtcccagccaatgcctgctttgaccagaggagtgtccacgtggctcaggtggtcgagtatctcataccgccctagcacacgtgtgactcctttcccctattgtctacgcagcctgcccttggacaaggacccgatgcccaaccccaggcctggcaagccctcggccccttccttggcccttggcccatccccaggagcctcgcccagctggagggctgcacccaaagcctcagacctgctgggggcccggggcccagggggaaccttccagggccgagatcttcgaggcggggcccatgcctcctcttcttccttgaaccccatgccaccatcgcagctgcaggtgaggccctgggcccaggatggggcaggcagggtggggtacctggacctacaggtgccgacctttactgtggcactgggcgggaggggggctggctggggcacaggaagtggtttctgggtcccaggcaagtctgtgacttatgcagatgttgcagggccaagaaaatccccacctgccaggcctcagagattggaggctctccccgacctcccaatccctgtctcaggagaggaggaggccgtattgtagtcccatgagcatagctatgtgtccccatccccatgtgacaagagaagaggactggggccaagtaggtgaggtgacagggctgaggccagctctgcaacttattagctgtttgatctttaaaaagttactcgatctccatgagcctcagtttccatacgtgtaaaagggggatgatcatagcatctaccatgtgggcttgcagtgcagagtatttgaattagacacagaacagtgaggatcaggatggcctctcacccacctgcctttctgcccagctgcccacactgcccctagtcatggtggcaccctccggggcacggctgggccccttgccccacttacaggcactcctccaggacaggccacatttcatgcaccaggtatggacggtgaatgggcagggaggagggagcaggtgggagaactgtggggaggggccccgagtcaggctgaaccacagcccacatgtgccccccagctctcaacggtggatgcccacgcccggacccctgtgctgcaggtgcaccccctggagagcccagccatgatcagcctcacaccacccaccaccgccactggggtcttctccctcaaggcccggcctggcctcccacctggtaacacctcagcccgtaccccatggcttcacagaacccccaagtccccagatccttggctgtgagcagtgtaggctattctgaattgcagtactctgggggtcaaaggtgtcaggtctcagaggcttggaaactccaccctccaaaaaacgtcaggtgcagaaccttaaagatgcagaatgtcaaaatcacaaaaccacagagctttacaaagctagtcaaaatgtcagcacctgcgaatggccgtctttaagcttctctgccagaagcctgggactttggggacagcagagccccctgggagtcagggttttcgaggctcaggagggtgggaagctcaaaatgagaggccttgtgggccaagctccagagcccagcccacagcctccataggtgccctgtccccacccacagggatcaacgtggccagcctggaatgggtgtccagggagccggcactgctctgcaccttcccaaatcccagtgcacccaggaaggacaggtcagtggacagggctgggaaggatcctcgccctcctatcccctcccctgacaccctctgtccccccagcaccctttcggctgtgccccagagctcctacccactgctggcaaatggtgtctgcaagtggcccggatgtgagaaggtcttcgaagagccagaggacttcctcaagtgagtggcccaggcctgtgccagtctaccggccctggcttgtggggagaggtctagggtgcagatctcagctcaggcttcatcccaataagtagtaagatgcaagagctaaactctgagactgtgggttcaaatcccagctccatccctgactggctgtgtgaccttggacaaattacttagcttctctcgacctcagttttctcgtatgtataataagaaacgtttgtgctgttatttacccccattttacagacaaggagactgaggccaaagaggttaagtgtcttgatcaaaatctcccagttcctgagtgacagagctgggatttgaacccatgtagccaggctctagaatctgcactcctgctttgccctgctactcctcatgccaacatgccagccttattccactgttcccaaagttctagctcctctagatggctgctgctgcctcccctcagtccccccatatgtctctctctctctctctctctctctctctctctctctctctctctctctctttctctctctctcacacacacacacacacaaatacacaccacactacacacaacccttagcagcaaccccacatgtcctgtcctccttgcagccaggcctttgcacaggccgtccctccacccagaatgctttgcccactctcacctccctggcccattctcaactcaccacacttccaacattatctccagcactctggccaggctcaagtggtgagttcaggcctgacatgcagtaggtgctgaggggcatgtgttaagggaacgaggggtgtgagagggagactgaggtagagaggggaggggagctggggctcagaggagagaactcccagagggtctgggccctccccattcagagcattgagccagaccaggcctgtcgtggtcacctgcatggaatcttctccctacttaggcactgccaggcggaccatcttctggatgagaagggcagggcacaatgtctcctccagagagagatggtacagtctctggagcagcaggtaatgccagggcggtggagggtaagggatagggatagtgcgcaaaaccttctgtccaccatgtgccagaaaccaagttcacctgggacgagggctggtataaaggaaggaagaggagcgggcactcccagggaagaccgtagcctgggcaaagatgtggcagagaagggccaggctgaggcctcatgtttgtgccatttcacagctggtgctggagaaggagaagctgagtgccatgcaggcccacctggctgggaaaatggcactgaccaaggcttcatctgtggtgagcgaccccaggactggtggtggcagactcagactgctggggggcagggaggaggtctgcacggtgcagggaacctaacctcacattcaggtcctgagagctaggggcccctgtccccagctccaaacatgcccagacctggaaatctgtccccttctacttacaaaccctctgaccccggctgggcgtggtggctcacgcctgtaatcccagcactttgggaggccgaggcgggtggatcacgaggtcaggagttcaagaccagcctcgccaagatggtgaaaccctgtgtctactaaaagtacaaaaaattagccaggcgtggtggcaggtgtctgtagtcccaactacttgggaggctgaggcagagaattgcttgaacctgggaggcggagtttgcagtgagctgagatcataccactgcactccagcctaggcgacagatcaagactccgtctcaagaaaaaaaaaaaaaaaaaaccctctgactctaagatccccaaacactgtgatcctgagttgttaaagcaaatgcaaatagccagacttgccagatgcaggctgtgtgccagcaggaccagctatgtaacctgcagggccccttgttcagatttcaagatggcgaccacagagcattaaacaaagcacagggtgccacataaccacataggtcacacgcccatgaagccagccctggaggccaggcactgtttctgagcgctttgctggtggtaatttatttctcatgatgcgaatgtacagatgaggaatattgaggccaggggggtttaggtgactttcccaaggtcacagttgggtggtaaagagccctattcaaccccagttcatggtcccagcatcagtggccacatacgacatccgcacctgtgctctaataaatacggctcatgctgttttgtgggattccacctcagactggaatttagaagagggcgtccttgctttgaaaaacactgatttaaaaataaagtggagccaggcgcagtggctcatgcctgtaatcccagcactttgggaggctgaagcgggtggatcacatgaggtcaggagttcgagaccagcctggctaacatggtgaaaccccatctctaccaaaaatacaaaaattagctgggcgtagtgacgggcacctgtagtcccagctactcgggaggctgaggcagaagacttgcttgaatctgggaggtgggggttgcagtgagccgagattgcaccactgcactccagcctgggcgacagagcaagactcagtatcaaaaaaaataaaaaacataaaatagaaagtaaaaagtgggaagtttaagcctctgggtcaccagcctctccccctcacccaggcatcatccgacaagggctcctgctgcatcgtagctgctggcagccaaggccctgtcgtcccagcctggtctggcccccgggaggcccctgacagcctgtttgctgtccggaggcacctgtggggtagccatggaaacagcacattcccaggtaagaatggtccttgcactacacggtgcccccaagctcctaatcctgacaggctctgggtggagggtgcaaaggagctccatgctgccccttcccaccaccaccaccactgcagctgccgccactcagcctttgggaaaatgcatccgctcacaaaagcttcctttcgggatgtccgtggcctgaaagccccccatatggtctcgagtgtcgggcccctagccctgactcccttggggattggggccatgcctcacccactctggactccagctactatattcggccatcagaagggagggaccctgctaagtaattccaggagcacctcctttcctcccctgaccaaggaaaatcggggtggattcgcccgagctcacctatccactgctctccaccaggcctggcctgtgggcttagcagggatcagagaccttgactgtcatcctggctctgccatttaacctcttgcatcctttggtgtgcaagttactccgcttcttttcaacctcggggagaactattttggcagaagtggtgcaaagaataaatgatacaacttatgtcaggtgctcagcaaacagtacctgtgcccgtggacacgggtgttgacggtgagatctcaggcctgtagactcaccttgtagggggaggggacagggagctagctaggaggtcctgcatggggcttgattcatccccaccctctgacagagttcctccacaacatggactacttcaagttccacaacatgcgaccccctttcacctacgccacgctcatccgctgggtaagcagggcagctcggccccaaggaggaggaagacaaagatggggtgggggacctgcctcccaaactcctgtctccctctgagtgccctcagagtgggttcctccattcccaagccccagccccaaggatccccaagccgtgcctcaaatgtgacccctcatgctggcttcaccccaaacctgtccgcaaatccaaacctaaaccaccatccaggccagagcatgccaaattctgaccctaaacctacccctttccagatgtccacctcagccccatacctaaccctctcctggacccataaaatagcctaaagctaaccccatctctgcaccttgccctaaacgtaccccagctcttactctaactccttccccagcctttatgccaacccaaccccatctccttccctggccccaacgtaccccagtatgtcaatacacccccaactgggcaccattcccaacctttccttgtaacacccatttgatccttaacttcatcaccccatcccaactccttcatctcagcctccccaatgccttctcagaaccttcatcctagcgccacacctaaccccaaacctgaacctcacccctacatgataccagatattccccgactgtctctgaactgaaaccctgacctagccccatcctgactgatagcctcactgcaatcatcatcgctgactctgtaatcccattcctgaatccaaactgatcaaattccctgaccctcagcctcactccacaccgaaccccacaactaacctcatccttgccctgagcctaaccacctaaccatgtccctgacacgtaagatactcgataattcaaaccatctctggcttctgacctaaagccaagtcatcccatccctcacccctagaccccccacctgagtccaccccagcctgactcttaacccaccccttccctgacccttaagttggcctggccctttaccccttccaaatccttgaccccacttctgacccttcaccttccccaaccctgaaatgtcacctccacagagaaccccaactccaactccatcccagacctttcacctcacttcagccctagccctgaacaagaccccactcccaacctcagtcctgatcccttacctaatcccagaacaaccatacccacacccatctaaccctgcccaacccgacacttcaccccttttctaaccccatctttgaccccatgcttcaccccacatctagtcctgtccctgattacctgcccctacaattccgcccccatgtcagatggctcggggtaggtcatagcccctctaaaccccaagtttggggaatgtgccccttaccccaccccccaacttccaggccatcctggaggctccagagaagcagcggacactcaatgagatctaccactggttcacacgcatgtttgccttcttcagaaaccatcctgccacctggaaggtgagctcctctgaggtggcggtgactgggatggcctcaagtgccatcgcagctcaaagtgggcaggcctgggtctgggctcataggcacattggggaggaacgggatgtgggttgttggtggtggctgctggcctcagaggttgacgcccacctgctccctgtccccggccttccacagaacgccatccgccacaacctgagtctgcacaagtgctttgtgcgggtggagagcgagaagggggctgtgtggaccgtggatgagctggagttccgcaagaaacggagccagaggcccagcaggtgttccaaccctacacctggcccctgacctcaagatcaaggaaaggaggatggacgaacaggggccaaactggtgggaggcagaggtggtgggggcagggatgataggccctggatgtgcccacagggaccaagaagtgaggtttccactgtcttgcctgccagggcccctgttcccccgctggcagccaccccctcccccatcatatcctttgccccaaggctgctcagaggggccccggtcctggccccagcccccacctccgccccagacacaccccccagtcgagccctgcagccaaacagagccttcacaaccagccacacagagcctgcctcagctgctcgcacagattacttcagggctggaaaagtcacacagacacacaaaatgtcacaatcctgtccctcactcaacacaaaccccaaaacacagagagcctgcctcagtacactcaaacaacctcaaagctgcatcatcacacaatcacacacaagcacagccctgacaacccacacaccccaaggcacgcacccacagccagcctcagggcccacaggggcactgtcaacacaggggtgtgcccagaggcctacacagaagcagcgtcagtaccctcaggatctgaggtcccaacacgtgctcgctcacacacacggcctgttagaattcacctgtgtatctcacgcatatgcacacgcacagccccccagtgggtctcttgagtcccgtgcagacacacacagccacacacactgccttgccaaaaataccccgtgtctcccctgccactcacctcactcccattccct

SEQ ID NO: 3 - RNA, 2292 nt, Homo sapiens
  source 1..2292: mol_type = mRNA
gcacacactcatcgaaaaaaatttggattattagaagagagaggtctgcggcttccacaccgtacagcgtggtttttcttctcggtataaaagcaaagttgtttttgatacgtgacagtttcccacaagccaggctgatccttttctgtcagtccacttcaccaagcctgcccttggacaaggacccgatgcccaaccccaggcctggcaagccctcggccccttccttggcccttggcccatccccaggagcctcgcccagctggagggctgcacccaaagcctcagacctgctgggggcccggggcccagggggaaccttccagggccgagatcttcgaggcggggcccatgcctcctcttcttccttgaaccccatgccaccatcgcagctgcagctctcaacggtggatgcccacgcccggacccctgtgctgcaggtgcaccccctggagagcccagccatgatcagcctcacaccacccaccaccgccactggggtcttctccctcaaggcccggcctggcctcccacctgggatcaacgtggccagcctggaatgggtgtccagggagccggcactgctctgcaccttcccaaatcccagtgcacccaggaaggacagcaccctttcggctgtgccccagagctcctacccactgctggcaaatggtgtctgcaagtggcccggatgtgagaaggtcttcgaagagccagaggacttcctcaagcactgccaggcggaccatcttctggatgagaagggcagggcacaatgtctcctccagagagagatggtacagtctctggagcagcagctggtgctggagaaggagaagctgagtgccatgcaggcccacctggctgggaaaatggcactgaccaaggcttcatctgtggcatcatccgacaagggctcctgctgcatcgtagctgctggcagccaaggccctgtcgtcccagcctggtctggcccccgggaggcccctgacagcctgtttgctgtccggaggcacctgtggggtagccatggaaacagcacattcccagagttcctccacaacatggactacttcaagttccacaacatgcgaccccctttcacctacgccacgctcatccgctgggccatcctggaggctccagagaagcagcggacactcaatgagatctaccactggttcacacgcatgtttgccttcttcagaaaccatcctgccacctggaagaacgccatccgccacaacctgagtctgcacaagtgctttgtgcgggtggagagcgagaagggggctgtgtggaccgtggatgagctggagttccgcaagaaacggagccagaggcccagcaggtgttccaaccctacacctggcccctgacctcaagatcaaggaaaggaggatggacgaacaggggccaaactggtgggaggcagaggtggtgggggcagggatgataggccctggatgtgcccacagggaccaagaagtgaggtttccactgtcttgcctgccagggcccctgttcccccgctggcagccaccccctcccccatcatatcctttgccccaaggctgctcagaggggccccggtcctggccccagcccccacctccgccccagacacaccccccagtcgagccctgcagccaaacagagccttcacaaccagccacacagagcctgcctcagctgctcgcacagattacttcagggctggaaaagtcacacagacacacaaaatgtcacaatcctgtccctcactcaacacaaaccccaaaacacagagagcctgcctcagtacactcaaacaacctcaaagctgcatcatcacacaatcacacacaagcacagccctgacaacccacacaccccaaggcacgcacccacagccagcctcagggcccacaggggcactgtcaacacaggggtgtgcccagaggcctacacagaagcagcgtcagtaccctcaggatctgaggtcccaacacgtgctcgctcacacacacggcctgttagaattcacctgtgtatctcacgcatatgcacacgcacagccccccagtgggtctcttgagtcccgtgcagacacacacagccacacacactgccttgccaaaaataccccgtgtctcccctgccactcacctcactcccattccctgagccctgatccatgcctcagcttagactgcagaggaactactcatttatttgggatccaaggcccccaacccacagtaccgtccccaataaactgcagccgagctccccacaaaaaaaaaaaaaaaa

SEQ ID NO: 4 - DNA, 26000 bp, Homo sapiens
  source 1..26000: mol_type = genomic DNA
aagagtgaaatccagaatttgccctgaatcatgccacgctttctagaggaccagtttaaaaaaaaaaaatagaaaaaaataaatgtccctagcatttcttccctggccctgtcactcactagctgagaggctttgagcaagctggctcatctctctgagctacctgtctcccctctactaaatggggataatcatagcacctacacaacacagcatgcacagcaggcctcacggagagaatggatctgatgttcatagcacagaaatcagtaaatgctggccagttatcttttgcagttaccaccatgcttcagttaccttgcccatgtttgctgcattcaatccaaccatgcaaagtgactgtcatttcccttagcagagaaggaaacggaggcaaggccacacagctgatgggcggagccgaatttaggagaggaatccaggaaactgtaggtgtggctccctaaatactgacactagctaacacctgtatgatactactttgagccagactcggttctgagcacctttactcttatcccgtaaagtagatgctataattctgttttacaggtgagggtcctgaggcatggtgtagttaaatgcgttggccaaggtcacaaggccagtaagtggcagcgccaggatttgaacccaggcaatctatgccagaatccacactcttaatgctgtaagaaaaaccatgctgcctgccccctttaaatgaagtctcagattatggtggggctcacaggtgggtgagtgggtacctgcctgcctgctcagttacccaggcacatctgcccaccagaccggagctagacctttctgaaccactcacagcctaaggccttaccagaaccagcagaacccacaaatgtcttactgcagccaggggcttctgaccaagcgtatacatacaaggtccaaaaagcattttcccatttccattcccagtcctcccaggaacagggaaatgtatacattttagggagaatctagtgatcctgggccagacttaggtgaccgcaaaaagaatcaggactagctgctgcccttaaagaactcatagcttgatagaggaaacctagggaaatcttctggggccccctggggtataactgattatttctccctgtccctaaatgatcacaggtggtgtggcaaaaaaacaagggacaaaaacttcaagtccagtacccatctggttctgtctctctgctagagccactgctttcttgtgagagcatgggctcagcccctcgcctccacaggactcaaaagtagattacagcgttaacagtagagtgcacaggcttcaaggtcaggcatgggtgaactggaagagccaggtgccatcactgcctcaaccagtttctccacctctggaatcctggtttcctgctctgtcagaaagagaatctgctctaccccccactggcaaagcccttggtccacactatgtcattgcagttctctccactccagcacactgctgatcattcacaccaagctcatttccaccccaggacctttgcacttgctgtttcctctacctagaacacccttgttccatatatgcacataactgttattcatcatccaggacttagtttaaatgaaacctcctcagaaaagtcctccctgttccttttcctacaaactctcccccacctccccaccgtatctgcataactcttctttatcatcattcgggactcacctcctcaaaggccctccctttaacagcatgtctgacacagtcattccctcccaatctatccccttactcccttcagcagctaactttgtccctatttatcctatctgcttgcttgcttgttttttcaaactgtctcccataggagcctgtatgaatccttgagggtagggtagatgtctgtcttgttcagggctttacagtggaactcaataaatggaggaataaaaccccagttaaaacagtgcctagcacgtgtttgacctccatcactctttgactgactgactcaatgcaccctcctccctgtcctggagagcaggcctgaggggttcctgggccggaatgcttgtcctccatcccagacacagccctgcgttggcggaggtggcgctggctgacattacctgcgcctcaccggcttcatgcagctcttcagctgcctggcctcagcctccacgggaccctggcactcgggctgtggctccagctgcggcagctgctgctgctggggcagcccttcggcatcagtgggtgtgggagcgggtgcgatccggagcaggactgtgtagttgcggccgtggttgttggcccagaaagtgccctcaggggtctcatagcgcaccacgaagtcgaggcgcgccccatcgcccgcgccctcagcaaagggcagctggaaggcaaagcggtcggtgcggccgccgtcgtcgggcgaggaggcggatgcctggccgggacccaggccgagccccggatccaggatgggatctcctgctcctgttcctcccgctcctgcccacggcgggctgcgcgggacgtagcgcgctgggtggtcgcaaaaggaagcccagccgtcgtgtgaggcccgcacgtgcaccgccttctcgaaggagcggttcagcacgcgtaccaacccgcgcagcaccggcgggcggcccccaggcacccacaccccggcacccccggggaccgctccgggaggcggcagcagcgcctccagctccaccatgacgcgccccaagcgctccagacggcccggcgcgggcggcagcgaaaatgtggggaccaggtaaaaccccccgccagcggggacggggcacagcggtgagggctcggggcaagcctcctcttcctcctccccttcatccccatcctcgccatcgtcgtcctcgtcggccccgccgccgccgccgccatcttgcccggccgccgccgccatcttgcccgccccgggcccgccccacggccggtagcggcgcaactgcgccagcggcagccccaaggcctcgtcggcgaacagcaccctccgcggggccaccgccgcctcgaccgaggtgcggggctcacccgcggccggcgaggggggcgcggaatgccgcagcgggggctccacaggggccgtacgcgccatatcggcggcggcggcggcaccgacggcaccggcggcgggaccggcgggggcagggcctgaaggggcgggcagccaatgggaaggccagcgcggaggggtacggctcacgggggcataggcggtgagatgaagacaagtattgcagagggccaatgggcagccatgcacggatgacgtacagcgaattgagagccggagaagcacgcagccaatggggatgcccgggagtgggcggtgtagggggcgggatgatcgaggaatcaatggagaggccggaatgggggtggtgcgaaatccatgatgaagaaaacagaagcagacagctaatgcggaagtctgagcgagagaggcatgtgggcggtgggaaaagtggaatggctacaggcgatgagggcagccgggaacgaacgcagaggcccaaaaagtgggagatcccgcgggttgcgtaggcggtggaacggtagctagagagagagaacagccaatggagagccacgcgtgggatgacgacaatggctgcagcgagccaatggggaggcttgtgagcgtgcactgcggcttcgaaggggtggtgccaaggtggagctagccaatacgaaggctaaaaggagaccaagaggcgggtgtgtagggagccgagccaatggaggtggaggctgaaggcgggagcgaggacgagagctggcggatagccaatgagggagccagggtgaaggcgtagagacctcaaaggacagtactagtatgggatgagccaatgccgaggctagatagtgcagcgggacggagggaggacttggaggcaagatggggaaaaaagcagagccgacgggggcagtgtaggtggtgtgaagggaggcatgagtagccaataaggaggctggagaggaggacgctgtgtagacagagtctgaggtattgggtggccggacagcagaaccatagaacgcaggcagccattaggaaaaatgtgcttctcagggatggggttaccctctccctaaccctccgtgactccccattgccccaggaatacccagagcccctgaaggcctagaccacaccttggtgtgtgaactaggaaagtgaaaatgactgtcctgttgcagttagttacttactgggtcctccctgcccaactacaaccttttcttgagcagtgccacaagccaagaatgcccctgattgttagccgcaagcactctccaggacttgatactattgttgaatgaatggccgaataggaaatttaactttctgaaggattcacttttttaaatttcagctcagcaaacactgacctgactgtgtgctaccagaagttgattgggcatatgggtagcttctgactaatggaatcacaatcaaagccctgtccttcttgcccaacctgacactccacaccccacaggggcctcacctcccttctttctgtccccccatctctgcttctactgttccctctcccaagagtgctgttccttctgctgcttccatctagtaaactcctttcgctctccctttggggtctcaccttctgtgggaactcaactgcagcttttgtccgctgaacacatccattcatacattccttctccatcctgggaagatttactgaacacctactgagtgccaggttctgagcatgctgttatctcattagaacctcacagcatcctaggagggaggtgatccttccagcagcccctctccccaggtctccatgttcaggatgtccatgagttagaaatgaatatgttcagctgcaagtaacagaaaaatcataaaataatgggggcttaagcaagacagaactttatttttttctcacctaaaagttcaagctggcaaatagtccagggactccttcctgcccacctggtttgggcattgtctgtcccgatctggctccaagactctcagtcttcaacaaatccttttggctgtctattaaaaatatttaccaaatccatcctcttctcaccacctccactgccagcactatcaccagtcacctagactactgcagtagccagctccttgctggtcccctgcttccacattcaggccctagaccccattgtacactcagcattcaggggcttcctgttaaatcctaacacggtttgtgtttctcctctgcttgcaaccctgtcatgccttcctcctcactcagcgttgaagccaaagtccttaccatggcctacaaggtcctgcgtggtctaacctccgagtcccctttctgacctcacctccagcttctcttcttgctctctccacactaaccacaccagcccccttgtagaccttgaacaaatcaggtacattcccacctcaggacctttgccctggctgtttcctttggagttcctcagatatctagctggctccctccctcatctccttcaagtctttgtcagaggcccctgtctctggggacttttcctgacccgtttaatcttgcctactcacccccaactcccagccctcccagtctccttcccgagaagccctccatgagagaggatatagtccagtatagaggggaggtagcgacctctacccctctctgccctcctgaccccagcccccattctgcaaggatcttggctttcagcagccgtagcatttccctctcacaccctgggcctgcccaaggggccagctcacattctcggccaccatcctcacttcgtttgcctcctatatctctggccactctctttcatggagtgagtgacagtaagggacagatggtctggggaaggtataaggagaatgcagcccacacctctgatcctgagagagaaaactagcccccttttccaggagggggacaggtgctggggcagggaacaatgcctctgctgatagaactggcctggtttataattacgcaggaggtgtagggaacattccgacccaagtctgcagggagcaaggggttattaactatgggaacatcagtgcaagggatcattaaccttaggaccatcactgcaaggggtcattaaccttggggccatcactagaatcagctccccaggactccttcctgacatgcatgctcctcaccccctcccttgctccctcccacatgccgtgacatctgttaaacacctgctgttcacagggtccctgcaggcctccaagcaggggacctcatcccaccttggtgcctcccctggctgtccaacacacccaagccatttttgggtctcagatgtgtcccaccaactcagaagcctcaaccagcgaaagttttgttttgaactaatggtggggagggttgggtgtttttttttttttttaattgttgttggctgatttttttaaggtctttttttttctattctttttttttttttttcttgtcttcacaaagccaggccatcaggcccattctgggcttttccagaagggtgagtctgagttgaggaaagaggccctcctttttacgagggcttagaaggttgggggaggaaagggggcaaaggggtgaaggggtggatcttggccaccagatttgtaccatgtaaataaaaagccctttccaatttctcttccccaggtctgaagccagtcttgtagagggctggagtggttgttggacgactagaaccctgggctttgcagggtgctgggagctggaagtcttcaccatggcctgtcaggagaagcccctgggggctggtctaccatgctgaccagtggttgaatagagtgcctgctgaggtcaagagatgcagccgccaattcctggacaacctaaaagcctcacaagcttcaagtctccaaggactctccaaatcccaggatctccctgccatcacatcctagaatttaaaacctgagaacatcaagttcaggaaagcttggggatttcaaagcccagcaccaaagaaagcgggacccacactcgccagctctgtgatcttgggcaagttgcttgactacttatacctccgtttccctcatctgtataacaggaatacaataatgatgagatggagctcaaggggccatggtgaggattgaacatgatcacttgtgagacatgttcagcactgtatctgacccatggaaaattcaagataaacatcagctactgagatgatggcggatatttggaatcctaaatccttggaaactggggctttttgaagtaaaagaccccaaaggctgagggcctcagaagcatcaggccatgatgttcctgaaacaagagggtcagggtcccaatgggcctctggggttcatcgtgaggatggatgcattaatattggggacctgctagggaccttcccagtgggacagtggctgggtcagggcactcaagccctaaaacgtgatgaggcgagacttttctctctttcctcattcagtaactgtcagtagattctgggagccagggattctccgactcttcaagtccatgaattttaggggatgacagtgggctctccgctttctcctccatgaagtaacttacatgcccctcaccctctgtgggaggggtgttgcagggggtgcagaactcccctcgccgggtagttcaagcaatggggaccatatcaattccatctatagggaaactgaggcctggagtagggcgaggcctctgggaacccagccctattctgtctctttccctggcatttcccatccacacatagagcttcagattctctttctttccccagagaccctcaaatatcctctcactcacagaatggtgtctctgcctgcctcgggttggccctgtgatttattttagttcttttcccttgttttttttttttcaaactctatacacttttgttttaaaaactgtggtttctcatgagccctattatctcattgatacctctcacctctgtggtgaggggaagaaatcatattttcagatgactcgtaaagggcaaagaaaaaaacccaaaatttcaaaatttccgtttaagtctcataatcaagaaaaggagaaacacagagagagagaaaaaaaaaactatgagaacccctccccaccccgtgattatcagcgcacacactcatcgaaaaaaatttggattattagaagagagaggtctgcggcttccacaccgtacagcgtggtttttcttctcggtataaaagcaaagttgtttttgatacgtgacagtttcccacaagccaggctgatccttttctgtcagtccacttcaccaaggtgagtgtccctgctctcccctaccagatgtgggccccattggaggagatggcagggaggtaggcacggcgggggggtcaggggccctctggtacagtgggatgtacccagctaccgtgattccagccaggtaaggtctttaaaaaaataatagaataaatggcagaagacttaaaggtgaagtacttaatgcatgggcaggggcaaaaataaatgaattcatcaattgatacgtagatggataggatttttaaaatatgtcagctgccagtctttatggatttcagagctttgaacaacttgaaatgctgtccaggtgcaactgaaaatttcaactgcatctctctcatctctttgtctcttagctcttgatgcctctcatccttctctgtctctctgctcaccctgtcttgctcttttacatgtttctctgcctctctttctcccgccatctgtctgtcgctacactcagactctctttccccgcatctctcctggcctctgaccatctcccctatctctgtctcctccatcttgaccacactccatcgatctcctttcctccatctctcccgctctcttttcttgccttcccccacctgccttcccagccagcatccagcctagagctttgtacacagctggcgtttaataatagtaatgtcgccgaggacctttacattttatgagagtgagcatcagttctgttcaccctagtagcaggaggattgcaaggtgccggggcaagctgagcacttaactgaactttgcttgtatcgctttagaggagacccttggggcgggggggcagggagcacttcacaccattgtcaaccgtagtttagctgtgtggacctaccccaggactgcatgtgtgtgaccagagtccatattcaggaagcaaacaggttgttcagggctggggtgagctcgattctgcaggcttagcacagcgtttggcacaaagtaagtgctcacgaagtgttagctattagtatttctgtaaccaaattagaatcatgctatatattggttttgttcctgctttattcaattaacagtagtgtttttgaagcttactaaaaattgtttgaacacatgatctttcatgatggacaagactgtcctcacatcagcatgaactttgattgatttgaccaagtgccgattgttggacattccggttgtttctcgtttttttctataaacatccctgactgcttccttggattcctgaaaagggagttgctggggcaaagggggcgtgcatttttaaagtttatgaccctctctgctaattctccttccaaaaggttgtcctattttatgctccctctacttaagctaaccctaggtgagtattattatgttttaattatttcccaacatgacaggtaagaaaaacacattatcacattgttgaaatttgcatcttgtgattacttttactattcattggccattcatgcttttttttttttttttttggttgtctggtcatgtccttactcctaatagggtgttcatcttatttttcccttattgatttgccacagctctttatttggaatggttattaacctttcatcagccattacatatatagcaaatattttccccaattcatcatttgctttttttctatttgtttatggtgttttttgtgatgcttatgatggttttatacagtcaaataggttagtctttttttctgtggcttctgtctctggttttgtgcttagaaagtcctttcctacttgaaaatgagataaatgttcacctatgttggcttctagtctcttttatggcttcattttttccatttactatagaggttaagagtgtgggtactggagccagactgtctgggacaaacccagcgtcaccccaagccctatgtgtgatttttagccaggcacttaacctctccatacctccatttcctcatatgtactgcaatggttataatagtaccttcctcaggagtctttgtttagattaaaatttttaaccacagtaaatacttagcacaaggcctgacacacaataaacccaagatcagcattaggtgttaaaacttatatcttgaatggatctgggcattttagggtatatgatgatggtgacatttcaaactgggcagggaggggttgttgggataatggactgactattcactcaataactttatcttctccctaattatctcagacacatttgttaaaccatactccatggtcctccagtttgaaatgccacattcatcacaaattcagttctctccatatgtgggtccatgtccaagctttctattctgttctcttccccagtatctgttcttataccagggccacactgttttgctgattgttgctttgcaatacaattcaatacccagccatgggtgtccctggcaccttgcccttctttattcttgattatttcaggcagcatcagttgaaccagccagagaccagcaaatgttcttatttgaggcaatcctcctctcgcacacatgcactctggctctccatgcatgtgtccatttctctcaatgtctctcactatctcttgttctctcttgctcgctctttgtgtgtgtctctttgtctctatgtatccctatctctcagccagtcccctggatagaggggcaattgtcaacttgaagccctgcagacacctaatgacttaaccagacagcgtagaagggccctggcccttgtctactccacgcctctccgtgctcagtgtagaagggcaaattgaagaccagagatctcagggcctcaccgaaatgcagcggcagagttgaaatccaagcctagatctcaggactctaggtgggaccctggttctggctctctccccaactgcaggcctcagtttacccctcagcacccagaagggggaaggggaacctgggctaccattcccccttctgccttctcacacgttggaccccaacttcccacaggttggacgatccacgatcacagtgtggggcccagcctcacaagagctgggctaggtgaggccccggactccataggtcaggaggcctagttggccagagcgtggtgatgatggaggcatgtcagtcagtcaggctgtgtgtccccagagctggtgctggtccccgaaaaccttgattgtggggcccctctagagagtctgatgatgggctctgtattggcgaaggctgaggcttttccagctccccccatgaggcccagaccaaaggcacaccagcctcaacctcctcctccccctgttgccatctctggcggagtggccatgtatttgggaacgttgttccagagtggacagggagactgaggccctagggaggctggctctgtttccaggcctggtaggcaagaggccctatgaagcagcaagctgcctgactttcagatggttccaaggagtttggacaccagggacactggcctacacatactgagactttgggaccgtagaccccacagtctgtggttttgagattctaggatcctttaaatctaagaaatgctgttctatgattctgaggtcctggtgttatactatttgaagaccccaggggtcccagtatctgtggagcctgcctggcactctcagagcttcaaacctgggtcctctccacaacccaagaagggccaggtcttcagagctaggggcttgtcatagtggccagatggacatcacctaccacatccaccagcacccatgtcaccccacctgggccaagcctgctgcaggacagggcagccagttctcggaacgaaacctgtggggtggggtatctgccctcttctcttcctccgtggtgtcgatgaagcccggcgcatccggccgccatgacgtcaatggcggaaaaatctgggcaagtcgggggctgtgacaacagggcccagatgcagaccccgatatgaaaacataatctgtgtcccagaaacatcccccattcagcttctgagaaacccagtcagaaagggacgtcccaacagacagtgcaggaagccggctgcccagcccggccctctaggtcctctacccccagacagatcatctccatgtccctgtctgagaatgtatctatgctttgctgagtcaggccatcccacatgtgtttggggagaattcttagctctggccaagtgtccaggcagcttcagaagtgaccacaggccagccacatgggccaggccagagtggtggaaaacatccatttgcaccgaaatcggtattagtttgttctggctgctataacaaagtaccacaactgagtggcttcagcaacagaaattgatcatctcacagttctggaggccagagtccaagatcaaggtgttgccagggttggttccttctgggggccataagggagaagctgctccaggcctctcccccagcttctggtggttgctggcaatctttgttatttcttggcttgaaggagcatcaccccatctctggcttcattcattcactcaccttctcatctcaccagtgctctcccaggcccttgttcggagcctccacagacccacactcctgtttctcacgcagtaatgttctaagcccccaggagactaagaacttaatacctggattctcacactcatctccctcagcaccacagctctgacaaccacccccaggaggtgacagcaaagaaaggaaggagcaactgctcccccagaacccttctatactcccccgggctgctctcagcagctgtgtgcccaactcagtgctgtgaggtggaacggggagatggagacacacacacacacacaccagagagtttataaaatgtgcacacggaaacacttcctaaagaaagaagtggagttctcaagtcactatgggactacggaactcggcatctgagcatccccttctgtataatggggttggctgggcagtcccttccagctctggcttcctctcagaccaggattataggatcctgaaaagccagtgcttccctcagggagtggaaggttctggggctcagcagggggcccggagccattgtggagggctttcaaggtgaggacaatagaagagcaggtcttgcgtggcttggacagggaaagaggagaaggagtgggcatttgaggcagggggtgtagcatgagccaggcttgagggccagaaattggggtgaactctgatgggggctgggtagagaagcttctacaggccccagctcaagagaccccatctctcctcctctctgtcacttgccatgctggatccgtgcatgatcacactcctggactcgcctccttgccctgagatccagacccccgtattcagctgccccctcagctcctccactcacatatttaatgccagactcttcatgtctatctacacctgcacttttgcacccaatccaactccccgccatgtcccccatctcaggtaatgtcagctcggtccttccagctgctcaagctaaaacccatgtcactttgactctccctcttgcccactacatccaagctgctagcactgctcctgatccagcttcagattaagtctcagaatctacccacttctcgccttctccactgccaccagcccattctgtgccagcatcatcacttgccaggactgttacaatagcctcctcactagccccactcacagcagccagatgaatcttttgagtccatgcctagtcactggggcaaaataggactccgaggagaaagtccgagaccagctccggcaagatgagcaaacacagcctgtgcagggtgcagggagggctagaggcctgaggcttgaaacagctctcaagtggagggggaaacaaccattgccctcatagaggacacatccacaccagggctgtgctagcgtgggcaggcaagccaggtgctggacctctgcacgtggggcatgtgtgggtatgtacatgtacctgtgttcttggtgtgtgtgtgtgtgtgtgtgtgtgtgtgtgtctagagctggggtgcaactatggggcccctcgggacatgtcccagccaatgcctgctttgaccagaggagtgtccacgtggctcaggtggtcgagtatctcataccgccctagcacacgtgtgactcctttcccctattgtctacgcagcctgcccttggacaaggacccgatgcccaaccccaggcctggcaagccctcggccccttccttggcccttggcccatccccaggagcctcgcccagctggagggctgcacccaaagcctcagacctgctgggggcccggggcccagggggaaccttccagggccgagatcttcgaggcggggcccatgcctcctcttcttccttgaaccccatgccaccatcgcagctgcaggtgaggccctgggcccaggatggggcaggcagggtggggtacctggacctacaggtgccgacctttactgtggcactgggcgggaggggggctggctggggcacaggaagtggtttctgggtcccaggcaagtctgtgacttatgcagatgttgcagggccaagaaaatccccacctgccaggcctcagagattggaggctctccccgacctcccaatccctgtctcaggagaggaggaggccgtattgtagtcccatgagcatagctatgtgtccccatccccatgtgacaagagaagaggactggggccaagtaggtgaggtgacagggctgaggccagctctgcaacttattagctgtttgatctttaaaaagttactcgatctccatgagcctcagtttccatacgtgtaaaagggggatgatcatagcatctaccatgtgggcttgcagtgcagagtatttgaattagacacagaacagtgaggatcaggatggcctctcacccacctgcctttctgcccagctgcccacactgcccctagtcatggtggcaccctccggggcacggctgggccccttgccccacttacaggcactcctccaggacaggccacatttcatgcaccaggtatggacggtgaatgggcagggaggagggagcaggtgggagaactgtggggaggggccccgagtcaggctgaaccacagcccacatgtgccccccagctctcaacggtggatgcccacgcccggacccctgtgctgcaggtgcaccccctggagagcccagccatgatcagcctcacaccacccaccaccgccactggggtcttctccctcaaggcccggcctggcctcccacctggtaacacctcagcccgtaccccatggcttcacagaacccccaagtccccagatccttggctgtgagcagtgtaggctattctgaattgcagtactctgggggtcaaaggtgtcaggtctcagaggcttggaaactccaccctccaaaaaacgtcaggtgcagaaccttaaagatgcagaatgtcaaaatcacaaaaccacagagctttacaaagctagtcaaaatgtcagcacctgcgaatggccgtctttaagcttctctgccagaagcctgggactttggggacagcagagccccctgggagtcagggttttcgaggctcaggagggtgggaagctcaaaatgagaggccttgtgggccaagctccagagcccagcccacagcctccataggtgccctgtccccacccacagggatcaacgtggccagcctggaatgggtgtccagggagccggcactgctctgcaccttcccaaatcccagtgcacccaggaaggacaggtcagtggacagggctgggaaggatcctcgccctcctatcccctcccctgacaccctctgtccccccagcaccctttcggctgtgccccagagctcctacccactgctggcaaatggtgtctgcaagtggcccggatgtgagaaggtcttcgaagagccagaggacttcctcaagtgagtggcccaggcctgtgccagtctaccggccctggcttgtggggagaggtctagggtgcagatctcagctcaggcttcatcccaataagtagtaagatgcaagagctaaactctgagactgtgggttcaaatcccagctccatccctgactggctgtgtgaccttggacaaattacttagcttctctcgacctcagttttctcgtatgtataataagaaacgtttgtgctgttatttacccccattttacagacaaggagactgaggccaaagaggttaagtgtcttgatcaaaatctcccagttcctgagtgacagagctgggatttgaacccatgtagccaggctctagaatctgcactcctgctttgccctgctactcctcatgccaacatgccagccttattccactgttcccaaagttctagctcctctagatggctgctgctgcctcccctcagtccccccatatgtctctctctctctctctctctctctctctctctctctctctctctctctctctctttctctctctctcacacacacacacacacaaatacacaccacactacacacaacccttagcagcaaccccacatgtcctgtcctccttgcagccaggcctttgcacaggccgtccctccacccagaatgctttgcccactctcacctccctggcccattctcaactcaccacacttccaacattatctccagcactctggccaggctcaagtggtgagttcaggcctgacatgcagtaggtgctgaggggcatgtgttaagggaacgaggggtgtgagagggagactgaggtagagaggggaggggagctggggctcagaggagagaactcccagagggtctgggccctccccattcagagcattgagccagaccaggcctgtcgtggtcacctgcatggaatcttctccctacttaggcactgccaggcggaccatcttctggatgagaagggcagggcacaatgtctcctccagagagagatggtacagtctctggagcagcaggtaatgccagggcggtggagggtaagggatagggatagtgcgcaaaaccttctgtccaccatgtgccagaaaccaagttcacctgggacgagggctggtataaaggaaggaagaggagcgggcactcccagggaagaccgtagcctgggcaaagatgtggcagagaagggccaggctgaggcctcatgtttgtgccatttcacagctggtgctggagaaggagaagctgagtgccatgcaggcccacctggctgggaaaatggcactgaccaaggcttcatctgtggtgagcgaccccaggactggtggtggcagactcagactgctggggggcagggaggaggtctgcacggtgcagggaacctaacctcacattcaggtcctgagagctaggggcccctgtccccagctccaaacatgcccagacctggaaatctgtccccttctacttacaaaccctctgaccccggctgggcgtggtggctcacgcctgtaatcccagcactttgggaggccgaggcgggtggatcacgaggtcaggagttcaagaccagcctcgccaagatggtgaaaccctgtgtctactaaaagtacaaaaaattagccaggcgtggtggcaggtgtctgtagtcccaactacttgggaggctgaggcagagaattgcttgaacctgggaggcggagtttgcagtgagctgagatcataccactgcactccagcctaggcgacagatcaagactccgtctcaagaaaaaaaaaaaaaaaaaaccctctgactctaagatccccaaacactgtgatcctgagttgttaaagcaaatgcaaatagccagacttgccagatgcaggctgtgtgccagcaggaccagctatgtaacctgcagggccccttgttcagatttcaagatggcgaccacagagcattaaacaaagcacagggtgccacataaccacataggtcacacgcccatgaagccagccctggaggccaggcactgtttctgagcgctttgctggtggtaatttatttctcatgatgcgaatgtacagatgaggaatattgaggccaggggggtttaggtgactttcccaaggtcacagttgggtggtaaagagccctattcaaccccagttcatggtcccagcatcagtggccacatacgacatccgcacctgtgctctaataaatacggctcatgctgttttgtgggattccacctcagactggaatttagaagagggcgtccttgctttgaaaaacactgatttaaaaataaagtggagccaggcgcagtggctcatgcctgtaatcccagcactttgggaggctgaagcgggtggatcacatgaggtcaggagttcgagaccagcctggctaacatggtgaaaccccatctctaccaaaaatacaaaaattagctgggcgtagtgacgggcacctgtagtcccagctactcgggaggctgaggcagaagacttgcttgaatctgggaggtgggggttgcagtgagccgagattgcaccactgcactccagcctgggcgacagagcaagactcagtatcaaaaaaaataaaaaacataaaatagaaagtaaaaagtgggaagtttaagcctctgggtcaccagcctctccccctcacccaggcatcatccgacaagggctcctgctgcatcgtagctgctggcagccaaggccctgtcgtcccagcctggtctggcccccgggaggcccctgacagcctgtttgctgtccggaggcacctgtggggtagccatggaaacagcacattcccaggtaagaatggtccttgcactacacggtgcccccaagctcctaatcctgacaggctctgggtggagggtgcaaaggagctccatgctgccccttcccaccaccaccaccactgcagctgccgccactcagcctttgggaaaatgcatccgctcacaaaagcttcctttcgggatgtccgtggcctgaaagccccccatatggtctcgagtgtcgggcccctagccctgactcccttggggattggggccatgcctcacccactctggactccagctactatattcggccatcagaagggagggaccctgctaagtaattccaggagcacctcctttcctcccctgaccaaggaaaatcggggtggattcgcccgagctcacctatccactgctctccaccaggcctggcctgtgggcttagcagggatcagagaccttgactgtcatcctggctctgccatttaacctcttgcatcctttggtgtgcaagttactccgcttcttttcaacctcggggagaactattttggcagaagtggtgcaaagaataaatgatacaacttatgtcaggtgctcagcaaacagtacctgtgcccgtggacacgggtgttgacggtgagatctcaggcctgtagactcaccttgtagggggaggggacagggagctagctaggaggtcctgcatggggcttgattcatccccaccctctgacagagttcctccacaacatggactacttcaagttccacaacatgcgaccccctttcacctacgccacgctcatccgctgggtaagcagggcagctcggccccaaggaggaggaagacaaagatggggtgggggacctgcctcccaaactcctgtctccctctgagtgccctcagagtgggttcctccattcccaagccccagccccaaggatccccaagccgtgcctcaaatgtgacccctcatgctggcttcaccccaaacctgtccgcaaatccaaacctaaaccaccatccaggccagagcatgccaaattctgaccctaaacctacccctttccagatgtccacctcagccccatacctaaccctctcctggacccataaaatagcctaaagctaaccccatctctgcaccttgccctaaacgtaccccagctcttactctaactccttccccagcctttatgccaacccaaccccatctccttccctggccccaacgtaccccagtatgtcaatacacccccaactgggcaccattcccaacctttccttgtaacacccatttgatccttaacttcatcaccccatcccaactccttcatctcagcctccccaatgccttctcagaaccttcatcctagcgccacacctaaccccaaacctgaacctcacccctacatgataccagatattccccgactgtctctgaactgaaaccctgacctagccccatcctgactgatagcctcactgcaatcatcatcgctgactctgtaatcccattcctgaatccaaactgatcaaattccctgaccctcagcctcactccacaccgaaccccacaactaacctcatccttgccctgagcctaaccacctaaccatgtccctgacacgtaagatactcgataattcaaaccatctctggcttctgacctaaagccaagtcatcccatccctcacccctagaccccccacctgagtccaccccagcctgactcttaacccaccccttccctgacccttaagttggcctggccctttaccccttccaaatccttgaccccacttctgacccttcaccttccccaaccctgaaatgtcacctccacagagaaccccaactccaactccatcccagacctttcacctcacttcagccctagccctgaacaagaccccactcccaacctcagtcctgatcccttacctaatcccagaacaaccatacccacacccatctaaccctgcccaacccgacacttcaccccttttctaaccccatctttgaccccatgcttcaccccacatctagtcctgtccctgattacctgcccctacaattccgcccccatgtcagatggctcggggtaggtcatagcccctctaaaccccaagtttggggaatgtgccccttaccccaccccccaacttccaggccatcctggaggctccagagaagcagcggacactcaatgagatctaccactggttcacacgcatgtttgccttcttcagaaaccatcctgccacctggaaggtgagctcctctgaggtggcggtgactgggatggcctcaagtgccatcgcagctcaaagtgggcaggcctgggtctgggctcataggcacattggggaggaacgggatgtgggttgttggtggtggctgctggcctcagaggttgacgcccacctgctccctgtccccggccttccacagaacgccatccgccacaacctgagtctgcacaagtgctttgtgcgggtggagagcgagaagggggctgtgtggaccgtggatgagctggagttccgcaagaaacggagccagaggcccagcaggtgttccaaccctacacctggcccctgacctcaagatcaaggaaaggaggatggacgaacaggggccaaactggtgggaggcagaggtggtgggggcagggatgataggccctggatgtgcccacagggaccaagaagtgaggtttccactgtcttgcctgccagggcccctgttcccccgctggcagccaccccctcccccatcatatcctttgccccaaggctgctcagaggggccccggtcctggccccagcccccacctccgccccagacacaccccccagtcgagccctgcagccaaacagagccttcacaaccagccacacagagcctgcctcagctgctcgcacagattacttcagggctggaaaagtcacacagacacacaaaatgtcacaatcctgtccctcactcaacacaaaccccaaaacacagagagcctgcctcagtacactcaaacaacctcaaagctgcatcatcacacaatcacacacaagcacagccctgacaacccacacaccccaaggcacgcacccacagccagcctcagggcccacaggggcactgtcaacacaggggtgtgcccagaggcctacacagaagcagcgtcagtaccctcaggatctgaggtcccaacacgtgctcgctcacacacacggcctgttagaattcacctgtgtatctcacgcatatgcacacgcacagccccccagtgggtctcttgagtcccgtgcagacacacacagccacacacactgccttgccaaaaataccccgtgtctcccctgccactcacctcactcccattccctgagccctgatccatgcctcagcttagactgcagaggaactactcatttatttgggatccaaggcccccaacccacagtaccgtccccaataaactgcagccgagctccccacatgctggactatcaccccatataagggttgcggtcagtgggcaggggtctgggtccaaggccgcagcaggaggaactggacagcggaggaagtagctagggcatgtgcttggccactgcctccagcaccccaaatccctgcctgaggctggggagagacctctgccggcggctcctcaggcctcccggacccggcctaggaggccagcgttctcctggcggagggctcggtagtcctcccggatcttctccaggttgctgagggtcttcttgcccagctctgtctcgatctgaggcaatgtgaacacatgccccctcagcacacacagcccctttcccagctcctgctcaccagcccccatcacagccactctgggcccctcccaccaactccaacagcctgctctgtcccatggccaggcctcgtgtggtgttccctctacccaaagcatccttcgccatgtggcaggattccccctacatctttaagctgaagcctctgcccatggccctgggaggcagacaggagggcccttggggtggaagctggggctcacagtaggccacttgcctgtcccaggtcacaggcactaaggggcagggctgggtgtccagccatcggctgtgtgtggctccacagcctctgtcagcataacctgaggaactgtccccccggcccgccttggctccccatcctgcccccaggcctcacctgctcctcgaggtctcgaacctcccgcatgatggtgcctgtgtcctcgatggtctggatgagctggctgcagttctggggacaacaggagcagaaggcttgcacccagtcccacccacccccagcagccccaccccaggcacatgtctcccctcacctcgtgcagagcagctagatacttataggccttccgaacagcatcgtccttcttggcatcctgaccagacacagggacctcaaaggtatcagtgggctgcccttgaccatctccatgccctaagaaggccaccctctcccaccaccccactagcttcatcctccatgaaacaaagccagccctgggtatcagtgcacctccagcctcgcacagggcctgggtctggaccccagccagccaattagcagatgcacaaggcagcagcccagcctcaccccactcacccccgcccaacctgccccacaccttgaacacaagctcatcagtcaccgcaaacgtccggtccagcttcccagatagggagttgatttccttctgaagctccttcgtatcagacaagatctggcagacaccatggcagccatgagcccctgcctggggcaggctggctagcagtggagggtcctcatgtgtaccagacagggactgtgtcactgtgtcaggggtgactgggatggattgtgtgtgactattctgtgttagagtgtgactggacagctctgcctgagggtgtgaggtccctgtgcggccacactatgcctgacagcccacatgacccaccctccatggccctggcagtgtaccttggtgatctcttccttctgcttccggatgttgcccacgatctccaggatgcgctgggtgtaggccagccgggacacatctctgggcagagtctccagctctgacatctaggcagggatatagcaggcactgccccaggaccatccccccaccctcctaagctacccaggtccctcacacaggccttaccagctgcttatagacctcctccttcctgcgggcctcttcagcagccgcccggacactctggtgcagttcttggatctctgccagccgtcgagaagattccagctgccatgagcccacaggcagaagacagtgagcagagcatagggatggccccctagagagggaccgagcctgccctggcccgcccacagcccagggccccactgcttacctctctgcaatcctgcagctttcggaggtggcggtactcagcgaggagtgggacccggtgcttctcccactgacccgccaagtggatgacccgctgggcactattctccaccacaagctggtgggggatgggtacatgtcacacaggctgggccctccaaccccaccccaccccaccctgcccctctccgcccagctacagccccaaccccacctgcagcttggcaaggttggcagtcccatcgggcagcagctccaccgcgcggctcttcaggcgcagggcctgctcacgctctgctgtactgagcttgctgtgccggcactcagactctgcctggccggtggatacccagtcacatgccacagcccccatggagctccacagatgactgtacacccctgtggcccccacaggcctctctaacagctccacgctggtgccaaggaccccgaggaccccctaatcccctgtccatgcagacccgtgggtaccccacagatgcccacagaccctccgaggacccctcaatcccctgcccatgcagacccgcggtgccccatagatgcccacagaccctcaccctggcctgattctcatagccaccctcaagaggcccacagatccctaatggctcccaggaacccttctgccatgtgcagacctctacagagcacctcttgccccatctagtccctcacaccccgaggccctccttctgacctagcccaacgcgcagcccctcctccgccccttacctgcacaaagctgacgcccagggtcttcatgtcggcctcaacctcctcaatgctgcggttcactccttccagctgctcccgaagggactcgagctcctgttcctgagctgcccacgtgacctgggaggcccaggccagtcagggttggggtgtcaggcccagtagacaagcaagggcctgggacacccccctccaaaccactctgctcacctgttcaggccgccgggaggtggctggcacatctgacacctgagtggcctgggcctggggctcctaaggggagtgacgaggggcatcctggctgccagggaaggcccttcctcacgtggcccagcctcagcctcccctgagaactgcccccagtgcggcatgcatgcccactgaagcaccgatggtggccagactgtgactatgtgggtaaaggcaccatctgcaacctcgggccagagtgcttgctcgtggagaaatctccctgaccctgtcacagctcctacccacctgccccatctctcaagcctcaaatgcccatgagaaggatggggggccctcagagtgaacatcttaggacagaagatatgctcaaaggaaactgcctgaggaaagggggtgttgccccaagaacacccccacacctttgcatggttcccacctatccacattttctccagtcaagtccctaataagctaggggacccctctgggtacccatcccacagtggggcgagggcctgtccagtgggaacacaggaacctgtgtggataaaggtg

SEQ ID NO: 5 - DNA, 1326 bp, Homo sapiens
  source 1..1326: mol_type = genomic DNA
atgtcccccatctcaggagcctcgcccagctggagggctgcacccaaagcctcagacctgctgggggcccggggcccagggggaaccttccagggccgagatcttcgaggcggggcccatgcctcctcttcttccttgaaccccatgccaccatcgcagctgcagctctcaacggtggatgcccacgcccggacccctgtgctgcaggtgcaccccctggagagcccagccatgatcagcctcacaccacccaccaccgccactggggtcttctccctcaaggcccggcctggcctcccacctgggatcaacgtggccagcctggaatgggtgtccagggagccggcactgctctgcaccttcccaaatcccagtgcacccaggaaggacagcaccctttcggctgtgccccagagctcctacccactgctggcaaatggtgtctgcaagtggcccggatgtgagaaggtcttcgaagagccagaggacttcctcaagcactgccaggcggaccatcttctggatgagaagggcagggcacaatgtctcctccagagagagatggtacagtctctggagcagcagctggtgctggagaaggagaagctgagtgccatgcaggcccacctggctgggaaaatggcactgaccaaggcttcatctgtggcatcatccgacaagggctcctgctgcatcgtagctgctggcagccaaggccctgtcgtcccagcctggtctggcccccgggaggcccctgacagcctgtttgctgtccggaggcacctgtggggtagccatggaaacagcacattcccagagttcctccacaacatggactacttcaagttccacaacatgcgaccccctttcacctacgccacgctcatccgctgggccatcctggaggctccagagaagcagcggacactcaatgagatctaccactggttcacacgcatgtttgccttcttcagaaaccatcctgccacctggaaggtgagctcctctgaggtggcggtgactgggatggcctcaagtgccatcgcagctcaaagtgggcaggcctgggtctgggctcataggcacattggggaggaacgggatgtgggttgttggtggtggctgctggcctcagaggttgacgcccacctgctccctgtccccggccttccacagaacgccatccgccacaacctgagtctgcacaagtgctttgtgcgggtggagagcgagaagggggctgtgtggaccgtggatgagctggagttccgcaagaaacggagccagaggcccagcaggtgttccaaccctacacctggcccctga

SEQ ID NO: 6 - DNA, 23 bp, synthetic construct
  misc_feature 1..23: note = Description of Artificial Sequence: Syntheticprimer
  source 1..23: mol_type = other DNA
ctacttcaagttccacaacatgc

SEQ ID NO: 7 - DNA, 23 bp, synthetic construct
  misc_feature 1..23: note = Description of Artificial Sequence: Syntheticprimer
  source 1..23: mol_type = other DNA
ccagtggtagatctcattgagtg

SEQ ID NO: 8 - DNA, 23 bp, synthetic construct
  misc_feature 1..23: note = Description of Artificial Sequence: Syntheticprobe
  source 1..23: mol_type = other DNA
cctttcacctacgccacgctcat

SEQ ID NO: 9 - DNA, 16 bp, synthetic construct
  misc_feature 1..16: note = Description of Artificial Sequence: Syntheticoligonucleotide
  source 1..16: mol_type = other DNA
ttgaagtagtccatgt

SEQ ID NO: 10 - DNA, 16 bp, synthetic construct
  misc_feature 1..16: note = Description of Artificial Sequence: Syntheticoligonucleotide
  source 1..16: mol_type = other DNA
atttttttcgatgagt

SEQ ID NO: 11 - DNA, 16 bp, synthetic construct
  misc_feature 1..16: note = Description of Artificial Sequence: Syntheticoligonucleotide
  source 1..16: mol_type = other DNA
ttttataccgagaaga

SEQ ID NO: 12 - DNA, 16 bp, synthetic construct
  misc_feature 1..16: note = Description of Artificial Sequence: Syntheticoligonucleotide
  source 1..16: mol_type = other DNA
tgcgatggtggcatgg

SEQ ID NO: 13 - DNA, 16 bp, synthetic construct
  misc_feature 1..16: note = Description of Artificial Sequence: Syntheticoligonucleotide
  source 1..16: mol_type = other DNA
ggctgatcatggctgg

SEQ ID NO: 14 - DNA, 16 bp, synthetic construct
  misc_feature 1..16: note = Description of Artificial Sequence: Syntheticoligonucleotide
  source 1..16: mol_type = other DNA
caccatttgccagcag

SEQ ID NO: 15 - DNA, 16 bp, synthetic construct
  misc_feature 1..16: note = Description of Artificial Sequence: Syntheticoligonucleotide
  source 1..16: mol_type = other DNA
tcggatgatgccacag

SEQ ID NO: 16 - DNA, 16 bp, synthetic construct
  misc_feature 1..16: note = Description of Artificial Sequence: Syntheticoligonucleotide
  source 1..16: mol_type = other DNA
aactctgggaatgtgc

SEQ ID NO: 17 - DNA, 16 bp, synthetic construct
  misc_feature 1..16: note = Description of Artificial Sequence: Syntheticoligonucleotide
  source 1..16: mol_type = other DNA
tgcggaactccagctc

SEQ ID NO: 18 - DNA, 16 bp, synthetic construct
  misc_feature 1..16: note = Description of Artificial Sequence: Syntheticoligonucleotide
  source 1..16: mol_type = other DNA
gtggaaacctcacttc

SEQ ID NO: 19 - DNA, 16 bp, synthetic construct
  misc_feature 1..16: note = Description of Artificial Sequence: Syntheticoligonucleotide
  source 1..16: mol_type = other DNA
gaagtaatctgtgcga

SEQ ID NO: 20 - DNA, 16 bp, synthetic construct
  misc_feature 1..16: note = Description of Artificial Sequence: Syntheticoligonucleotide
  source 1..16: mol_type = other DNA
gaattctaacaggccg

SEQ ID NO: 21 - DNA, 16 bp, synthetic construct
  misc_feature 1..16: note = Description of Artificial Sequence: Syntheticoligonucleotide
  source 1..16: mol_type = other DNA
ggtatttttggcaagg

SEQ ID NO: 22 - DNA, 16 bp, synthetic construct
  misc_feature 1..16: note = Description of Artificial Sequence: Syntheticoligonucleotide
  source 1..16: mol_type = other DNA
cggtactgtgggttgg

SEQ ID NO: 23 - DNA, 16 bp, synthetic construct
  misc_feature 1..16: note = Description of Artificial Sequence: Syntheticoligonucleotide
  source 1..16: mol_type = other DNA
agggacaggattgtga

SEQ ID NO: 24 - DNA, 16 bp, synthetic construct
  misc_feature 1..16: note = Description of Artificial Sequence: Syntheticoligonucleotide
  source 1..16: mol_type = other DNA
ccgaaagggtgctgtc

SEQ ID NO: 25 - DNA, 16 bp, synthetic construct
  misc_feature 1..16: note = Description of Artificial Sequence: Syntheticoligonucleotide
  source 1..16: mol_type = other DNA
gtccaagggcaggctt

SEQ ID NO: 26 - DNA, 16 bp, synthetic construct
  misc_feature 1..16: note = Description of Artificial Sequence: Syntheticoligonucleotide
  source 1..16: mol_type = other DNA
ggccaggccgggcctt

SEQ ID NO: 27 - DNA, 16 bp, synthetic construct
  misc_feature 1..16: note = Description of Artificial Sequence: Syntheticoligonucleotide
  source 1..16: mol_type = other DNA
gaaaaaccacgctgta

SEQ ID NO: 28 - DNA, 16 bp, synthetic construct
  misc_feature 1..16: note = Description of Artificial Sequence: Syntheticoligonucleotide
  source 1..16: mol_type = other DNA
ttgcagacaccatttg

SEQ ID NO: 29 - DNA, 16 bp, synthetic construct
  misc_feature 1..16: note = Description of Artificial Sequence: Syntheticoligonucleotide
  source 1..16: mol_type = other DNA
tggtagatctcattga

SEQ ID NO: 30 - DNA, 16 bp, synthetic construct
  misc_feature 1..16: note = Description of Artificial Sequence: Syntheticoligonucleotide
  source 1..16: mol_type = other DNA
taacaggccgtgtgtg

SEQ ID NO: 31 - DNA, 16 bp, synthetic construct
  misc_feature 1..16: note = Description of Artificial Sequence: Syntheticoligonucleotide
  source 1..16: mol_type = other DNA
gttgagtgagggacag

SEQ ID NO: 32 - DNA, 16 bp, synthetic construct
  misc_feature 1..16: note = Description of Artificial Sequence: Syntheticoligonucleotide
  source 1..16: mol_type = other DNA
aggcatggatcagggc

SEQ ID NO: 33 - DNA, 16 bp, synthetic construct
  misc_feature 1..16: note = Description of Artificial Sequence: Syntheticoligonucleotide
  source 1..16: mol_type = other DNA
ccacgctgtacggtgt

SEQ ID NO: 34 - DNA, 16 bp, synthetic construct
  misc_feature 1..16: note = Description of Artificial Sequence: Syntheticoligonucleotide
  source 1..16: mol_type = other DNA
cattgagtgtccgctg

SEQ ID NO: 35 - DNA, 16 bp, synthetic construct
  misc_feature 1..16: note = Description of Artificial Sequence: Syntheticoligonucleotide
  source 1..16: mol_type = other DNA
tgcagctgcgatggtg

SEQ ID NO: 36 - DNA, 16 bp, synthetic construct
  misc_feature 1..16: note = Description of Artificial Sequence: Syntheticoligonucleotide
  source 1..16: mol_type = other DNA
ggctgcagggctcgac

SEQ ID NO: 37 - DNA, 16 bp, synthetic construct
  misc_feature 1..16: note = Description of Artificial Sequence: Syntheticoligonucleotide
  source 1..16: mol_type = other DNA
acgctgtacggtgtgg

SEQ ID NO: 38 - DNA, 16 bp, synthetic construct
  misc_feature 1..16: note = Description of Artificial Sequence: Syntheticoligonucleotide
  source 1..16: mol_type = other DNA
agagactgtaccatct

SEQ ID NO: 39 - DNA, 16 bp, synthetic construct
  misc_feature 1..16: note = Description of Artificial Sequence: Syntheticoligonucleotide
  source 1..16: mol_type = other DNA
attctaacaggccgtg

SEQ ID NO: 40 - DNA, 16 bp, synthetic construct
  misc_feature 1..16: note = Description of Artificial Sequence: Syntheticoligonucleotide
  source 1..16: mol_type = other DNA
tctaacaggccgtgtg

SEQ ID NO: 41 - DNA, 16 bp, synthetic construct
  misc_feature 1..16: note = Description of Artificial Sequence: Syntheticoligonucleotide
  source 1..16: mol_type = other DNA
gcagacaccatttgcc

SEQ ID NO: 42 - DNA, 16 bp, synthetic construct
  misc_feature 1..16: note = Description of Artificial Sequence: Syntheticoligonucleotide
  source 1..16: mol_type = other DNA
tccaagggcaggcttg

SEQ ID NO: 43 - DNA, 16 bp, synthetic construct
  misc_feature 1..16: note = Description of Artificial Sequence: Syntheticoligonucleotide
  source 1..16: mol_type = other DNA
gtctaagctgaggcat

SEQ ID NO: 44 - DNA, 16 bp, synthetic construct
  misc_feature 1..16: note = Description of Artificial Sequence: Syntheticoligonucleotide
  source 1..16: mol_type = other DNA
cagaaaaggatcagcc

SEQ ID NO: 45 - DNA, 16 bp, synthetic construct
  misc_feature 1..16: note = Description of Artificial Sequence: Syntheticoligonucleotide
  source 1..16: mol_type = other DNA
ccagagactgtaccat

SEQ ID NO: 46 - DNA, 16 bp, synthetic construct
  misc_feature 1..16: note = Description of Artificial Sequence: Syntheticoligonucleotide
  source 1..16: mol_type = other DNA
gccgaaagggtgctgg

SEQ ID NO: 47 - DNA, 16 bp, synthetic construct
  misc_feature 1..16: note = Description of Artificial Sequence: Syntheticoligonucleotide
  source 1..16: mol_type = other DNA
tgcctatgagcccaga

SEQ ID NO: 48 - DNA, 16 bp, synthetic construct
  misc_feature 1..16: note = Description of Artificial Sequence: Syntheticoligonucleotide
  source 1..16: mol_type = other DNA
cgtcaacctctgaggc

SEQ ID NO: 49 - DNA, 16 bp, synthetic construct
  misc_feature 1..16: note = Description of Artificial Sequence: Syntheticoligonucleotide
  source 1..16: mol_type = other DNA
gtacatcccactgtac

SEQ ID NO: 50 - DNA, 16 bp, synthetic construct
  misc_feature 1..16: note = Description of Artificial Sequence: Syntheticoligonucleotide
  source 1..16: mol_type = other DNA
gacaatggtgtgaagt

SEQ ID NO: 51 - DNA, 16 bp, synthetic construct
  misc_feature 1..16: note = Description of Artificial Sequence: Syntheticoligonucleotide
  source 1..16: mol_type = other DNA
ctaatttggttacaga

SEQ ID NO: 52 - DNA, 16 bp, synthetic construct
  misc_feature 1..16: note = Description of Artificial Sequence: Syntheticoligonucleotide
  source 1..16: mol_type = other DNA
gttaataaccattcca

SEQ ID NO: 53 - DNA, 16 bp, synthetic construct
  misc_feature 1..16: note = Description of Artificial Sequence: Syntheticoligonucleotide
  source 1..16: mol_type = other DNA
ctctatagtaaatgga

SEQ ID NO: 54 - DNA, 16 bp, synthetic construct
  misc_feature 1..16: note = Description of Artificial Sequence: Syntheticoligonucleotide
  source 1..16: mol_type = other DNA
taaaatgcccagatcc

SEQ ID NO: 55 - DNA, 16 bp, synthetic construct
  misc_feature 1..16: note = Description of Artificial Sequence: Syntheticoligonucleotide
  source 1..16: mol_type = other DNA
tgacaattgcccctct

SEQ ID NO: 56 - DNA, 16 bp, synthetic construct
  misc_feature 1..16: note = Description of Artificial Sequence: Syntheticoligonucleotide
  source 1..16: mol_type = other DNA
tgcatttcggtgaggc

SEQ ID NO: 57 - DNA, 16 bp, synthetic construct
  misc_feature 1..16: note = Description of Artificial Sequence: Syntheticoligonucleotide
  source 1..16: mol_type = other DNA
agatttaaaggatcct

SEQ ID NO: 58 - DNA, 16 bp, synthetic construct
  misc_feature 1..16: note = Description of Artificial Sequence: Syntheticoligonucleotide
  source 1..16: mol_type = other DNA
tgacatgggtgctggt

SEQ ID NO: 59 - DNA, 16 bp, synthetic construct
  misc_feature 1..16: note = Description of Artificial Sequence: Syntheticoligonucleotide
  source 1..16: mol_type = other DNA
ggtattaagttcttag

SEQ ID NO: 60 - DNA, 16 bp, synthetic construct
  misc_feature 1..16: note = Description of Artificial Sequence: Syntheticoligonucleotide
  source 1..16: mol_type = other DNA
gctcatgctacacccc

SEQ ID NO: 61 - DNA, 16 bp, synthetic construct
  misc_feature 1..16: note = Description of Artificial Sequence: Syntheticoligonucleotide
  source 1..16: mol_type = other DNA
tggattgggtgcaaaa

SEQ ID NO: 62 - DNA, 16 bp, synthetic construct
  misc_feature 1..16: note = Description of Artificial Sequence: Syntheticoligonucleotide
  source 1..16: mol_type = other DNA
gacttaatctgaagct

SEQ ID NO: 63 - DNA, 16 bp, synthetic construct
  misc_feature 1..16: note = Description of Artificial Sequence: Syntheticoligonucleotide
  source 1..16: mol_type = other DNA
cacttgagagctgttt

SEQ ID NO: 64 - DNA, 16 bp, synthetic construct
  misc_feature 1..16: note = Description of Artificial Sequence: Syntheticoligonucleotide
  source 1..16: mol_type = other DNA
tgagatactcgaccac

SEQ ID NO: 65 - DNA, 16 bp, synthetic construct
  misc_feature 1..16: note = Description of Artificial Sequence: Syntheticoligonucleotide
  source 1..16: mol_type = other DNA
tgctatgatcatcccc

SEQ ID NO: 66 - DNA, 16 bp, synthetic construct
  misc_feature 1..16: note = Description of Artificial Sequence: Syntheticoligonucleotide
  source 1..16: mol_type = other DNA
gcacatgtgggctgtg

SEQ ID NO: 67 - DNA, 16 bp, synthetic construct
  misc_feature 1..16: note = Description of Artificial Sequence: Syntheticoligonucleotide
  source 1..16: mol_type = other DNA
atctttaaggttctgc

SEQ ID NO: 68 - DNA, 16 bp, synthetic construct
  misc_feature 1..16: note = Description of Artificial Sequence: Syntheticoligonucleotide
  source 1..16: mol_type = other DNA
ctacttattgggatga

SEQ ID NO: 69 - DNA, 16 bp, synthetic construct
  misc_feature 1..16: note = Description of Artificial Sequence: Syntheticoligonucleotide
  source 1..16: mol_type = other DNA
cttattatacatacga

SEQ ID NO: 70 - DNA, 16 bp, synthetic construct
  misc_feature 1..16: note = Description of Artificial Sequence: Syntheticoligonucleotide
  source 1..16: mol_type = other DNA
gattctagagcctggc

SEQ ID NO: 71 - DNA, 16 bp, synthetic construct
  misc_feature 1..16: note = Description of Artificial Sequence: Syntheticoligonucleotide
  source 1..16: mol_type = other DNA
gcattacctgctgctc

SEQ ID NO: 72 - DNA, 16 bp, synthetic construct
  misc_feature 1..16: note = Description of Artificial Sequence: Syntheticoligonucleotide
  source 1..16: mol_type = other DNA
ctttataccagccctc

SEQ ID NO: 73 - DNA, 16 bp, synthetic construct
  misc_feature 1..16: note = Description of Artificial Sequence: Syntheticoligonucleotide
  source 1..16: mol_type = other DNA
cctgaatgtgaggtta

SEQ ID NO: 74 - DNA, 16 bp, synthetic construct
  misc_feature 1..16: note = Description of Artificial Sequence: Syntheticoligonucleotide
  source 1..16: mol_type = other DNA
tgctttaacaactcag

SEQ ID NO: 75 - DNA, 16 bp, synthetic construct
  misc_feature 1..16: note = Description of Artificial Sequence: Syntheticoligonucleotide
  source 1..16: mol_type = other DNA
tacattcgcatcatga

SEQ ID NO: 76 - DNA, 16 bp, synthetic construct
  misc_feature 1..16: note = Description of Artificial Sequence: Syntheticoligonucleotide
  source 1..16: mol_type = other DNA
gtatttattagagcac

SEQ ID NO: 77 - DNA, 16 bp, synthetic construct
  misc_feature 1..16: note = Description of Artificial Sequence: Syntheticoligonucleotide
  source 1..16: mol_type = other DNA
aggattaggagcttgg

SEQ ID NO: 78 - DNA, 16 bp, synthetic construct
  misc_feature 1..16: note = Description of Artificial Sequence: Syntheticoligonucleotide
  source 1..16: mol_type = other DNA
gaattacttagcaggg

SEQ ID NO: 79 - DNA, 16 bp, synthetic construct
  misc_feature 1..16: note = Description of Artificial Sequence: Syntheticoligonucleotide
  source 1..16: mol_type = other DNA
ccaaaatagttctccc

SEQ ID NO: 80 - DNA, 16 bp, synthetic construct
  misc_feature 1..16: note = Description of Artificial Sequence: Syntheticoligonucleotide
  source 1..16: mol_type = other DNA
aggtactgtttgctga

SEQ ID NO: 81 - DNA, 16 bp, synthetic construct
  misc_feature 1..16: note = Description of Artificial Sequence: Syntheticoligonucleotide
  source 1..16: mol_type = other DNA
cacatttgaggcacgg

SEQ ID NO: 82 - DNA, 16 bp, synthetic construct
  misc_feature 1..16: note = Description of Artificial Sequence: Syntheticoligonucleotide
  source 1..16: mol_type = other DNA
aggtttggatttgcgg

SEQ ID NO: 83 - DNA, 16 bp, synthetic construct
  misc_feature 1..16: note = Description of Artificial Sequence: Syntheticoligonucleotide
  source 1..16: mol_type = other DNA
ggctattttatgggtc

SEQ ID NO: 84 - DNA, 16 bp, synthetic construct
  misc_feature 1..16: note = Description of Artificial Sequence: Syntheticoligonucleotide
  source 1..16: mol_type = other DNA
gggaatatctggtatc

SEQ ID NO: 85 - DNA, 16 bp, synthetic construct
  misc_feature 1..16: note = Description of Artificial Sequence: Syntheticoligonucleotide
  source 1..16: mol_type = other DNA
gatcagtttggattca

SEQ ID NO: 86 - DNA, 16 bp, synthetic construct
  misc_feature 1..16: note = Description of Artificial Sequence: Syntheticoligonucleotide
  source 1..16: mol_type = other DNA
ggacatggttaggtgg

SEQ ID NO: 87 - DNA, 16 bp, synthetic construct
  misc_feature 1..16: note = Description of Artificial Sequence: Syntheticoligonucleotide
  source 1..16: mol_type = other DNA
ccaaatttttttcgat

SEQ ID NO: 88 - DNA, 16 bp, synthetic construct
  misc_feature 1..16: note = Description of Artificial Sequence: Syntheticoligonucleotide
  source 1..16: mol_type = other DNA
tgcttttataccgaga

SEQ ID NO: 89 - DNA, 16 bp, synthetic construct
  misc_feature 1..16: note = Description of Artificial Sequence: Syntheticoligonucleotide
  source 1..16: mol_type = other DNA
gtgcatgaaatgtggc

SEQ ID NO: 90 - DNA, 16 bp, synthetic construct
  misc_feature 1..16: note = Description of Artificial Sequence: Syntheticoligonucleotide
  source 1..16: mol_type = other DNA
ggatttgggaaggtgc

SEQ ID NO: 91 - DNA, 16 bp, synthetic construct
  misc_feature 1..16: note = Description of Artificial Sequence: Syntheticoligonucleotide
  source 1..16: mol_type = other DNA
ggagacattgtgccct

SEQ ID NO: 92 - DNA, 16 bp, synthetic construct
  misc_feature 1..16: note = Description of Artificial Sequence: Syntheticoligonucleotide
  source 1..16: mol_type = other DNA
tacgatgcagcaggag

SEQ ID NO: 93 - DNA, 16 bp, synthetic construct
  misc_feature 1..16: note = Description of Artificial Sequence: Syntheticoligonucleotide
  source 1..16: mol_type = other DNA
tggaacttgaagtagt

SEQ ID NO: 94 - DNA, 16 bp, synthetic construct
  misc_feature 1..16: note = Description of Artificial Sequence: Syntheticoligonucleotide
  source 1..16: mol_type = other DNA
gcctctggctccgttt

SEQ ID NO: 95 - DNA, 16 bp, synthetic construct
  misc_feature 1..16: note = Description of Artificial Sequence: Syntheticoligonucleotide
  source 1..16: mol_type = other DNA
caaaggatatgatggg

SEQ ID NO: 96 - DNA, 16 bp, synthetic construct
  misc_feature 1..16: note = Description of Artificial Sequence: Syntheticoligonucleotide
  source 1..16: mol_type = other DNA
gtgtactgaggcaggc

SEQ ID NO: 97 - DNA, 16 bp, synthetic construct
  misc_feature 1..16: note = Description of Artificial Sequence: Syntheticoligonucleotide
  source 1..16: mol_type = other DNA
gtgaattctaacaggc

SEQ ID NO: 98 - DNA, 16 bp, synthetic construct
  misc_feature 1..16: note = Description of Artificial Sequence: Syntheticoligonucleotide
  source 1..16: mol_type = other DNA
gggtatttttggcaag

SEQ ID NO: 99 - DNA, 16 bp, synthetic construct
  misc_feature 1..16: note = Description of Artificial Sequence: Syntheticoligonucleotide
  source 1..16: mol_type = other DNA
agctcggctgcagttt

SEQ ID NO: 100 - DNA, 16 bp, synthetic construct
  misc_feature 1..16: note = Description of Artificial Sequence: Syntheticoligonucleotide
  source 1..16: mol_type = other DNA
gcccagccgtgccccg

SEQ ID NO: 101 - DNA, 16 bp, synthetic construct
  misc_feature 1..16: note = Description of Artificial Sequence: Syntheticoligonucleotide
  source 1..16: mol_type = other DNA
cgagaagaaaaaccac

SEQ ID NO: 102 - DNA, 16 bp, synthetic construct
  misc_feature 1..16: note = Description of Artificial Sequence: Syntheticoligonucleotide
  source 1..16: mol_type = other DNA
ggccaggtgtagggtt

SEQ ID NO: 103 - DNA, 16 bp, synthetic construct
  misc_feature 1..16: note = Description of Artificial Sequence: Syntheticoligonucleotide
  source 1..16: mol_type = other DNA
ggcaggatggtttctg

SEQ ID NO: 104 - DNA, 16 bp, synthetic construct
  misc_feature 1..16: note = Description of Artificial Sequence: Syntheticoligonucleotide
  source 1..16: mol_type = other DNA
caccgttgagagctgg

SEQ ID NO: 105 - DNA, 16 bp, synthetic construct
  misc_feature 1..16: note = Description of Artificial Sequence: Syntheticoligonucleotide
  source 1..16: mol_type = other DNA
agacaccatttgccag

SEQ ID NO: 106 - DNA, 16 bp, synthetic construct
  misc_feature 1..16: note = Description of Artificial Sequence: Syntheticoligonucleotide
  source 1..16: mol_type = other DNA
ggtgaagtggactgac

SEQ ID NO: 107 - DNA, 16 bp, synthetic construct
  misc_feature 1..16: note = Description of Artificial Sequence: Syntheticoligonucleotide
  source 1..16: mol_type = other DNA
atccacggtccacaca

SEQ ID NO: 108 - DNA, 16 bp, synthetic construct
  misc_feature 1..16: note = Description of Artificial Sequence: Syntheticoligonucleotide
  source 1..16: mol_type = other DNA
gcccagcggatgagcg

SEQ ID NO: 109 - DNA, 16 bp, synthetic construct
  misc_feature 1..16: note = Description of Artificial Sequence: Syntheticoligonucleotide
  source 1..16: mol_type = other DNA
gcaaaggatatgatgg

SEQ ID NO: 110 - DNA, 16 bp, synthetic construct
  misc_feature 1..16: note = Description of Artificial Sequence: Syntheticoligonucleotide
  source 1..16: mol_type = other DNA
agctgaggcatggatc

SEQ ID NO: 111 - DNA, 16 bp, synthetic construct
  misc_feature 1..16: note = Description of Artificial Sequence: Syntheticoligonucleotide
  source 1..16: mol_type = other DNA
ctgcagggctcgactg

SEQ ID NO: 112 - DNA, 16 bp, synthetic construct
  misc_feature 1..16: note = Description of Artificial Sequence: Syntheticoligonucleotide
  source 1..16: mol_type = other DNA
ctccagagactgtacc

SEQ ID NO: 113 - DNA, 16 bp, synthetic construct
  misc_feature 1..16: note = Description of Artificial Sequence: Syntheticoligonucleotide
  source 1..16: mol_type = other DNA
agccgcagacctctct

SEQ ID NO: 114 - DNA, 16 bp, synthetic construct
  misc_feature 1..16: note = Description of Artificial Sequence: Syntheticoligonucleotide
  source 1..16: mol_type = other DNA
aagaaaaaccacgctg

SEQ ID NO: 115 - DNA, 16 bp, synthetic construct
  misc_feature 1..16: note = Description of Artificial Sequence: Syntheticoligonucleotide
  source 1..16: mol_type = other DNA
ttctaacaggccgtgt

SEQ ID NO: 116 - DNA, 16 bp, synthetic construct
  misc_feature 1..16: note = Description of Artificial Sequence: Syntheticoligonucleotide
  source 1..16: mol_type = other DNA
gaggaagtcctctggc

SEQ ID NO: 117 - DNA, 16 bp, synthetic construct
  misc_feature 1..16: note = Description of Artificial Sequence: Syntheticoligonucleotide
  source 1..16: mol_type = other DNA
gaggagacattgtgcc

SEQ ID NO: 118 - DNA, 16 bp, synthetic construct
  misc_feature 1..16: note = Description of Artificial Sequence: Syntheticoligonucleotide
  source 1..16: mol_type = other DNA
tctggaggagacattg

SEQ ID NO: 119 - DNA, 16 bp, synthetic construct
  misc_feature 1..16: note = Description of Artificial Sequence: Syntheticoligonucleotide
  source 1..16: mol_type = other DNA
ctcgaagatctcggcc

SEQ ID NO: 120 - DNA, 16 bp, synthetic construct
  misc_feature 1..16: note = Description of Artificial Sequence: Syntheticoligonucleotide
  source 1..16: mol_type = other DNA
agaaaaaccacgctgt

SEQ ID NO: 121 - DNA, 16 bp, synthetic construct
  misc_feature 1..16: note = Description of Artificial Sequence: Syntheticoligonucleotide
  source 1..16: mol_type = other DNA
ctaacaggccgtgtgt

SEQ ID NO: 122 - DNA, 16 bp, synthetic construct
  misc_feature 1..16: note = Description of Artificial Sequence: Syntheticoligonucleotide
  source 1..16: mol_type = other DNA
gggacaggattgtgac

SEQ ID NO: 123 - DNA, 16 bp, synthetic construct
  misc_feature 1..16: note = Description of Artificial Sequence: Syntheticoligonucleotide
  source 1..16: mol_type = other DNA
caagacagtggaaacc

SEQ ID NO: 124 - DNA, 16 bp, synthetic construct
  misc_feature 1..16: note = Description of Artificial Sequence: Syntheticoligonucleotide
  source 1..16: mol_type = other DNA
ggccatcccagtcacc

SEQ ID NO: 125 - DNA, 16 bp, synthetic construct
  misc_feature 1..16: note = Description of Artificial Sequence: Syntheticoligonucleotide
  source 1..16: mol_type = other DNA
accaacaacccacatc

SEQ ID NO: 126 - DNA, 16 bp, synthetic construct
  misc_feature 1..16: note = Description of Artificial Sequence: Syntheticoligonucleotide
  source 1..16: mol_type = other DNA
acccacatcccgttcc

SEQ ID NO: 127 - DNA, 16 bp, synthetic construct
  misc_feature 1..16: note = Description of Artificial Sequence: Syntheticoligonucleotide
  source 1..16: mol_type = other DNA
attaagtacttcacct

SEQ ID NO: 128 - DNA, 16 bp, synthetic construct
  misc_feature 1..16: note = Description of Artificial Sequence: Syntheticoligonucleotide
  source 1..16: mol_type = other DNA
atatggactctggtca

SEQ ID NO: 129 - DNA, 16 bp, synthetic construct
  misc_feature 1..16: note = Description of Artificial Sequence: Syntheticoligonucleotide
  source 1..16: mol_type = other DNA
aaaaatgcacgccccc

SEQ ID NO: 130 - DNA, 16 bp, synthetic construct
  misc_feature 1..16: note = Description of Artificial Sequence: Syntheticoligonucleotide
  source 1..16: mol_type = other DNA
gctatatatgtaatgg

SEQ ID NO: 131 - DNA, 16 bp, synthetic construct
  misc_feature 1..16: note = Description of Artificial Sequence: Syntheticoligonucleotide
  source 1..16: mol_type = other DNA
ataaccattgcagtac

SEQ ID NO: 132 - DNA, 16 bp, synthetic construct
  misc_feature 1..16: note = Description of Artificial Sequence: Syntheticoligonucleotide
  source 1..16: mol_type = other DNA
gtgaatagtcagtcca

SEQ ID NO: 133 - DNA, 16 bp, synthetic construct
  misc_feature 1..16: note = Description of Artificial Sequence: Syntheticoligonucleotide
  source 1..16: mol_type = other DNA
tcattaggtgtctgca

SEQ ID NO: 134 - DNA, 16 bp, synthetic construct
  misc_feature 1..16: note = Description of Artificial Sequence: Syntheticoligonucleotide
  source 1..16: mol_type = other DNA
caatcaaggttttcgg

SEQ ID NO: 135 - DNA, 16 bp, synthetic construct
  misc_feature 1..16: note = Description of Artificial Sequence: Syntheticoligonucleotide
  source 1..16: mol_type = other DNA
tagatttaaaggatcc

SEQ ID NO: 136 - DNA, 16 bp, synthetic construct
  misc_feature 1..16: note = Description of Artificial Sequence: Syntheticoligonucleotide
  source 1..16: mol_type = other DNA
ccagatttttccgcca

SEQ ID NO: 137 - DNA, 16 bp, synthetic construct
  misc_feature 1..16: note = Description of Artificial Sequence: Syntheticoligonucleotide
  source 1..16: mol_type = other DNA
agtatagaagggttct

SEQ ID NO: 138 - DNA, 16 bp, synthetic construct
  misc_feature 1..16: note = Description of Artificial Sequence: Syntheticoligonucleotide
  source 1..16: mol_type = other DNA
cagcatggcaagtgac

SEQ ID NO: 139 - DNA, 16 bp, synthetic construct
  misc_feature 1..16: note = Description of Artificial Sequence: Syntheticoligonucleotide
  source 1..16: mol_type = other DNA
agtgacatgggtttta

SEQ ID NO: 140 - DNA, 16 bp, synthetic construct
  misc_feature 1..16: note = Description of Artificial Sequence: Syntheticoligonucleotide
  source 1..16: mol_type = other DNA
gctattgtaacagtcc

SEQ ID NO: 141 - DNA, 16 bp, synthetic construct
  misc_feature 1..16: note = Description of Artificial Sequence: Syntheticoligonucleotide
  source 1..16: mol_type = other DNA
gtacatgtacataccc

SEQ ID NO: 142 - DNA, 16 bp, synthetic construct
  misc_feature 1..16: note = Description of Artificial Sequence: Syntheticoligonucleotide
  source 1..16: mol_type = other DNA
acagtaaaggtcggca

SEQ ID NO: 143 - DNA, 16 bp, synthetic construct
  misc_feature 1..16: note = Description of Artificial Sequence: Syntheticoligonucleotide
  source 1..16: mol_type = other DNA
ggccatcctgatcctc

SEQ ID NO: 144 - DNA, 16 bp, synthetic construct
  misc_feature 1..16: note = Description of Artificial Sequence: Syntheticoligonucleotide
  source 1..16: mol_type = other DNA
gcctacactgctcaca

SEQ ID NO: 145 - DNA, 16 bp, synthetic construct
  misc_feature 1..16: note = Description of Artificial Sequence: Syntheticoligonucleotide
  source 1..16: mol_type = other DNA
cacctatggaggctgt

SEQ ID NO: 146 - DNA, 16 bp, synthetic construct
  misc_feature 1..16: note = Description of Artificial Sequence: Syntheticoligonucleotide
  source 1..16: mol_type = other DNA
cttactacttattggg

SEQ ID NO: 147 - DNA, 16 bp, synthetic construct
  misc_feature 1..16: note = Description of Artificial Sequence: Syntheticoligonucleotide
  source 1..16: mol_type = other DNA
tcttattatacatacg

SEQ ID NO: 148 - DNA, 16 bp, synthetic construct
  misc_feature 1..16: note = Description of Artificial Sequence: Syntheticoligonucleotide
  source 1..16: mol_type = other DNA
tggcatgaggagtagc

SEQ ID NO: 149 - DNA, 16 bp, synthetic construct
  misc_feature 1..16: note = Description of Artificial Sequence: Syntheticoligonucleotide
  source 1..16: mol_type = other DNA
ggcattacctgctgct

SEQ ID NO: 150 - DNA, 16 bp, synthetic construct
  misc_feature 1..16: note = Description of Artificial Sequence: Syntheticoligonucleotide
  source 1..16: mol_type = other DNA
cctttataccagccct

SEQ ID NO: 151 - DNA, 16 bp, synthetic construct
  misc_feature 1..16: note = Description of Artificial Sequence: Syntheticoligonucleotide
  source 1..16: mol_type = other DNA
gggcatgtttggagct

SEQ ID NO: 152 - DNA, 16 bp, synthetic construct
  misc_feature 1..16: note = Description of Artificial Sequence: Syntheticoligonucleotide
  source 1..16: mol_type = other DNA
ggctatttgcatttgc

SEQ ID NO: 153 - DNA, 16 bp, synthetic construct
  misc_feature 1..16: note = Description of Artificial Sequence: Syntheticoligonucleotide
  source 1..16: mol_type = other DNA
atctgtacattcgcat

SEQ ID NO: 154 - DNA, 16 bp, synthetic construct
  misc_feature 1..16: note = Description of Artificial Sequence: Syntheticoligonucleotide
  source 1..16: mol_type = other DNA
cgtatttattagagca

SEQ ID NO: 155 - DNA, 16 bp, synthetic construct
  misc_feature 1..16: note = Description of Artificial Sequence: Syntheticoligonucleotide
  source 1..16: mol_type = other DNA
gcggatgcattttccc

SEQ ID NO: 156 - DNA, 16 bp, synthetic construct
  misc_feature 1..16: note = Description of Artificial Sequence: Syntheticoligonucleotide
  source 1..16: mol_type = other DNA
tggaattacttagcag

SEQ ID NO: 157 - DNA, 16 bp, synthetic construct
  misc_feature 1..16: note = Description of Artificial Sequence: Syntheticoligonucleotide
  source 1..16: mol_type = other DNA
gccaaaatagttctcc

SEQ ID NO: 158 - DNA, 16 bp, synthetic construct
  misc_feature 1..16: note = Description of Artificial Sequence: Syntheticoligonucleotide
  source 1..16: mol_type = other DNA
gtcaacacccgtgtcc

SEQ ID NO: 159 - DNA, 16 bp, synthetic construct
  misc_feature 1..16: note = Description of Artificial Sequence: Syntheticoligonucleotide
  source 1..16: mol_type = other DNA
tcacatttgaggcacg

SEQ ID NO: 160 - DNA, 16 bp, synthetic construct
  misc_feature 1..16: note = Description of Artificial Sequence: Syntheticoligonucleotide
  source 1..16: mol_type = other DNA
tggtttaggtttggat

SEQ ID NO: 161 - DNA, 16 bp, synthetic construct
  misc_feature 1..16: note = Description of Artificial Sequence: Syntheticoligonucleotide
  source 1..16: mol_type = other DNA
tagctttaggctattt

SEQ ID NO: 162 - DNA, 16 bp, synthetic construct
  misc_feature 1..16: note = Description of Artificial Sequence: Syntheticoligonucleotide
  source 1..16: mol_type = other DNA
gatgattgcagtgagg

SEQ ID NO: 163 - DNA, 16 bp, synthetic construct
  misc_feature 1..16: note = Description of Artificial Sequence: Syntheticoligonucleotide
  source 1..16: mol_type = other DNA
gggaatttgatcagtt

SEQ ID NO: 164 - DNA, 16 bp, synthetic construct
  misc_feature 1..16: note = Description of Artificial Sequence: Syntheticoligonucleotide
  source 1..16: mol_type = other DNA
gtttgaattatcgagt

SEQ ID NO: 165 - DNA, 16 bp, synthetic construct
  misc_feature 1..16: note = Description of Artificial Sequence: Syntheticoligonucleotide
  source 1..16: mol_type = other DNA
tccaaatttttttcga

SEQ ID NO: 166 - DNA, 16 bp, synthetic construct
  misc_feature 1..16: note = Description of Artificial Sequence: Syntheticoligonucleotide
  source 1..16: mol_type = other DNA
ggcatcgggtccttgt

SEQ ID NO: 167 - DNA, 16 bp, synthetic construct
  misc_feature 1..16: note = Description of Artificial Sequence: Syntheticoligonucleotide
  source 1..16: mol_type = other DNA
gggcatccaccgttga

SEQ ID NO: 168 - DNA, 16 bp, synthetic construct
  misc_feature 1..16: note = Description of Artificial Sequence: Syntheticoligonucleotide
  source 1..16: mol_type = other DNA
ttcctgggtgcactgg

SEQ ID NO: 169 - DNA, 16 bp, synthetic construct
  misc_feature 1..16: note = Description of Artificial Sequence: Syntheticoligonucleotide
  source 1..16: mol_type = other DNA
ctgcatggcactcagc

SEQ ID NO: 170 - DNA, 16 bp, synthetic construct
  misc_feature 1..16: note = Description of Artificial Sequence: Syntheticoligonucleotide
  source 1..16: mol_type = other DNA
gctacgatgcagcagg

SEQ ID NO: 171 - DNA, 16 bp, synthetic construct
  misc_feature 1..16: note = Description of Artificial Sequence: Syntheticoligonucleotide
  source 1..16: mol_type = other DNA
tctcattgagtgtccg

SEQ ID NO: 172 - DNA, 16 bp, synthetic construct
  misc_feature 1..16: note = Description of Artificial Sequence: Syntheticoligonucleotide
  source 1..16: mol_type = other DNA
ggcctatcatccctgc

SEQ ID NO: 173 - DNA, 16 bp, synthetic construct
  misc_feature 1..16: note = Description of Artificial Sequence: Syntheticoligonucleotide
  source 1..16: mol_type = other DNA
gtaatctgtgcgagca

SEQ ID NO: 174 - DNA, 16 bp, synthetic construct
  misc_feature 1..16: note = Description of Artificial Sequence: Syntheticoligonucleotide
  source 1..16: mol_type = other DNA
gatgatgcagctttga

SEQ ID NO: 175 - DNA, 16 bp, synthetic construct
  misc_feature 1..16: note = Description of Artificial Sequence: Syntheticoligonucleotide
  source 1..16: mol_type = other DNA
ggtgaattctaacagg

SEQ ID NO: 176 - DNA, 16 bp, synthetic construct
  misc_feature 1..16: note = Description of Artificial Sequence: Syntheticoligonucleotide
  source 1..16: mol_type = other DNA
taaatgagtagttcct

SEQ ID NO: 177 - DNA, 16 bp, synthetic construct
  misc_feature 1..16: note = Description of Artificial Sequence: Syntheticoligonucleotide
  source 1..16: mol_type = other DNA
tgccacagatgaagcc

SEQ ID NO: 178 - DNA, 16 bp, synthetic construct
  misc_feature 1..16: note = Description of Artificial Sequence: Syntheticoligonucleotide
  source 1..16: mol_type = other DNA
taccgagaagaaaaac

SEQ ID NO: 179 - DNA, 16 bp, synthetic construct
  misc_feature 1..16: note = Description of Artificial Sequence: Syntheticoligonucleotide
  source 1..16: mol_type = other DNA
agtgagggacaggatt

SEQ ID NO: 180 - DNA, 16 bp, synthetic construct
  misc_feature 1..16: note = Description of Artificial Sequence: Syntheticoligonucleotide
  source 1..16: mol_type = other DNA
cctcagatcctgaggg

SEQ ID NO: 181 - DNA, 16 bp, synthetic construct
  misc_feature 1..16: note = Description of Artificial Sequence: Syntheticoligonucleotide
  source 1..16: mol_type = other DNA
ccggagggtgccacca

SEQ ID NO: 182 - DNA, 16 bp, synthetic construct
  misc_feature 1..16: note = Description of Artificial Sequence: Syntheticoligonucleotide
  source 1..16: mol_type = other DNA
caaacaggctgtcagg

SEQ ID NO: 183 - DNA, 16 bp, synthetic construct
  misc_feature 1..16: note = Description of Artificial Sequence: Syntheticoligonucleotide
  source 1..16: mol_type = other DNA
cttttataccgagaag

SEQ ID NO: 184 - DNA, 16 bp, synthetic construct
  misc_feature 1..16: note = Description of Artificial Sequence: Syntheticoligonucleotide
  source 1..16: mol_type = other DNA
cgctctccacccgcac

SEQ ID NO: 185 - DNA, 16 bp, synthetic construct
  misc_feature 1..16: note = Description of Artificial Sequence: Syntheticoligonucleotide
  source 1..16: mol_type = other DNA
tggaagccgcagacct

SEQ ID NO: 186 - DNA, 16 bp, synthetic construct
  misc_feature 1..16: note = Description of Artificial Sequence: Syntheticoligonucleotide
  source 1..16: mol_type = other DNA
ctgcagtctaagctga

SEQ ID NO: 187 - DNA, 16 bp, synthetic construct
  misc_feature 1..16: note = Description of Artificial Sequence: Syntheticoligonucleotide
  source 1..16: mol_type = other DNA
ccccggagggtgccac

SEQ ID NO: 188 - DNA, 16 bp, synthetic construct
  misc_feature 1..16: note = Description of Artificial Sequence: Syntheticoligonucleotide
  source 1..16: mol_type = other DNA
actgaggcaggctctc

SEQ ID NO: 189 - DNA, 16 bp, synthetic construct
  misc_feature 1..16: note = Description of Artificial Sequence: Syntheticoligonucleotide
  source 1..16: mol_type = other DNA
gtgtagggttggaaca

SEQ ID NO: 190 - DNA, 16 bp, synthetic construct
  misc_feature 1..16: note = Description of Artificial Sequence: Syntheticoligonucleotide
  source 1..16: mol_type = other DNA
ggagaagaccccagtg

SEQ ID NO: 191 - DNA, 16 bp, synthetic construct
  misc_feature 1..16: note = Description of Artificial Sequence: Syntheticoligonucleotide
  source 1..16: mol_type = other DNA
gaagaaaaaccacgct

SEQ ID NO: 192 - DNA, 16 bp, synthetic construct
  misc_feature 1..16: note = Description of Artificial Sequence: Syntheticoligonucleotide
  source 1..16: mol_type = other DNA
ggctgcagtttattgg

SEQ ID NO: 193 - DNA, 16 bp, synthetic construct
  misc_feature 1..16: note = Description of Artificial Sequence: Syntheticoligonucleotide
  source 1..16: mol_type = other DNA
agaaaaggatcagcct

SEQ ID NO: 194 - DNA, 16 bp, synthetic construct
  misc_feature 1..16: note = Description of Artificial Sequence: Syntheticoligonucleotide
  source 1..16: mol_type = other DNA
ggtgtagggttggaac

SEQ ID NO: 195 - DNA, 16 bp, synthetic construct
  misc_feature 1..16: note = Description of Artificial Sequence: Syntheticoligonucleotide
  source 1..16: mol_type = other DNA
aaccacgctgtacggt

SEQ ID NO: 196 - DNA, 16 bp, synthetic construct
  misc_feature 1..16: note = Description of Artificial Sequence: Syntheticoligonucleotide
  source 1..16: mol_type = other DNA
gaaaaggatcagcctg

SEQ ID NO: 197 - DNA, 16 bp, synthetic construct
  misc_feature 1..16: note = Description of Artificial Sequence: Syntheticoligonucleotide
  source 1..16: mol_type = other DNA
tcgaagatctcggccc

SEQ ID NO: 198 - DNA, 16 bp, synthetic construct
  misc_feature 1..16: note = Description of Artificial Sequence: Syntheticoligonucleotide
  source 1..16: mol_type = other DNA
caccagtttggcccct

SEQ ID NO: 199 - DNA, 16 bp, synthetic construct
  misc_feature 1..16: note = Description of Artificial Sequence: Syntheticoligonucleotide
  source 1..16: mol_type = other DNA
ctgtacggtgtggaag

SEQ ID NO: 200 - DNA, 16 bp, synthetic construct
  misc_feature 1..16: note = Description of Artificial Sequence: Syntheticoligonucleotide
  source 1..16: mol_type = other DNA
tttataccgagaagaa

SEQ ID NO: 201 - DNA, 16 bp, synthetic construct
  misc_feature 1..16: note = Description of Artificial Sequence: Syntheticoligonucleotide
  source 1..16: mol_type = other DNA
ggcacttgaggccatc

SEQ ID NO: 202 - DNA, 16 bp, synthetic construct
  misc_feature 1..16: note = Description of Artificial Sequence: Syntheticoligonucleotide
  source 1..16: mol_type = other DNA
ccacatcccgttcctc

SEQ ID NO: 203 - DNA, 16 bp, synthetic construct
  misc_feature 1..16: note = Description of Artificial Sequence: Syntheticoligonucleotide
  source 1..16: mol_type = other DNA
cgccacctcagaggag

SEQ ID NO: 204 - DNA, 16 bp, synthetic construct
  misc_feature 1..16: note = Description of Artificial Sequence: Syntheticoligonucleotide
  source 1..16: mol_type = other DNA
aactgatgctcactct

SEQ ID NO: 205 - DNA, 16 bp, synthetic construct
  misc_feature 1..16: note = Description of Artificial Sequence: Syntheticoligonucleotide
  source 1..16: mol_type = other DNA
tgcagaatcgagctca

SEQ ID NO: 206 - DNA, 16 bp, synthetic construct
  misc_feature 1..16: note = Description of Artificial Sequence: Syntheticoligonucleotide
  source 1..16: mol_type = other DNA
cataataatactcacc

SEQ ID NO: 207 - DNA, 16 bp, synthetic construct
  misc_feature 1..16: note = Description of Artificial Sequence: Syntheticoligonucleotide
  source 1..16: mol_type = other DNA
caaatgatgaattggg

SEQ ID NO: 208 - DNA, 16 bp, synthetic construct
  misc_feature 1..16: note = Description of Artificial Sequence: Syntheticoligonucleotide
  source 1..16: mol_type = other DNA
gggtttattgtgtgtc

SEQ ID NO: 209 - DNA, 16 bp, synthetic construct
  misc_feature 1..16: note = Description of Artificial Sequence: Syntheticoligonucleotide
  source 1..16: mol_type = other DNA
tgagataattagggag

SEQ ID NO: 210 - DNA, 16 bp, synthetic construct
  misc_feature 1..16: note = Description of Artificial Sequence: Syntheticoligonucleotide
  source 1..16: mol_type = other DNA
cccttctacgctgtct

SEQ ID NO: 211 - DNA, 16 bp, synthetic construct
  misc_feature 1..16: note = Description of Artificial Sequence: Syntheticoligonucleotide
  source 1..16: mol_type = other DNA
gccaatacagagccca

SEQ ID NO: 212 - DNA, 16 bp, synthetic construct
  misc_feature 1..16: note = Description of Artificial Sequence: Syntheticoligonucleotide
  source 1..16: mol_type = other DNA
acagatactgggaccc

SEQ ID NO: 213 - DNA, 16 bp, synthetic construct
  misc_feature 1..16: note = Description of Artificial Sequence: Syntheticoligonucleotide
  source 1..16: mol_type = other DNA
gcatagatacattctc

SEQ ID NO: 214 - DNA, 16 bp, synthetic construct
  misc_feature 1..16: note = Description of Artificial Sequence: Syntheticoligonucleotide
  source 1..16: mol_type = other DNA
ggcttttcaggatcct

SEQ ID NO: 215 - DNA, 16 bp, synthetic construct
  misc_feature 1..16: note = Description of Artificial Sequence: Syntheticoligonucleotide
  source 1..16: mol_type = other DNA
tagacatgaagagtct

SEQ ID NO: 216 - DNA, 16 bp, synthetic construct
  misc_feature 1..16: note = Description of Artificial Sequence: Syntheticoligonucleotide
  source 1..16: mol_type = other DNA
ttaatctgaagctgga

SEQ ID NO: 217 - DNA, 16 bp, synthetic construct
  misc_feature 1..16: note = Description of Artificial Sequence: Syntheticoligonucleotide
  source 1..16: mol_type = other DNA
tcctattttgccccag

SEQ ID NO: 218 - DNA, 16 bp, synthetic construct
  misc_feature 1..16: note = Description of Artificial Sequence: Syntheticoligonucleotide
  source 1..16: mol_type = other DNA
ggtacatgtacatacc

SEQ ID NO: 219 - DNA, 16 bp, synthetic construct
  misc_feature 1..16: note = Description of Artificial Sequence: Syntheticoligonucleotide
  source 1..16: mol_type = other DNA
tgcataagtcacagac

SEQ ID NO: 220 - DNA, 16 bp, synthetic construct
  misc_feature 1..16: note = Description of Artificial Sequence: Syntheticoligonucleotide
  source 1..16: mol_type = other DNA
gtccatacctggtgca

SEQ ID NO: 221 - DNA, 16 bp, synthetic construct
  misc_feature 1..16: note = Description of Artificial Sequence: Syntheticoligonucleotide
  source 1..16: mol_type = other DNA
gagtactgcaattcag

SEQ ID NO: 222 - DNA, 16 bp, synthetic construct
  misc_feature 1..16: note = Description of Artificial Sequence: Syntheticoligonucleotide
  source 1..16: mol_type = other DNA
gtagactggcacaggc

SEQ ID NO: 223 - DNA, 16 bp, synthetic construct
  misc_feature 1..16: note = Description of Artificial Sequence: Syntheticoligonucleotide
  source 1..16: mol_type = other DNA
agtttagctcttgcat

SEQ ID NO: 224 - DNA, 16 bp, synthetic construct
  misc_feature 1..16: note = Description of Artificial Sequence: Syntheticoligonucleotide
  source 1..16: mol_type = other DNA
gggtaaataacagcac

SEQ ID NO: 225 - DNA, 16 bp, synthetic construct
  misc_feature 1..16: note = Description of Artificial Sequence: Syntheticoligonucleotide
  source 1..16: mol_type = other DNA
ggtgaccacgacaggc

SEQ ID NO: 226 - DNA, 16 bp, synthetic construct
  misc_feature 1..16: note = Description of Artificial Sequence: Syntheticoligonucleotide
  source 1..16: mol_type = other DNA
cactatccctatccct

SEQ ID NO: 227 - DNA, 16 bp, synthetic construct
  misc_feature 1..16: note = Description of Artificial Sequence: Syntheticoligonucleotide
  source 1..16: mol_type = other DNA
ccaggctacggtcttc

SEQ ID NO: 228 - DNA, 16 bp, synthetic construct
  misc_feature 1..16: note = Description of Artificial Sequence: Syntheticoligonucleotide
  source 1..16: mol_type = other DNA
aacaactcaggatcac

SEQ ID NO: 229 - DNA, 16 bp, synthetic construct
  misc_feature 1..16: note = Description of Artificial Sequence: Syntheticoligonucleotide
  source 1..16: mol_type = other DNA
ggttacatagctggtc

SEQ ID NO: 230 - DNA, 16 bp, synthetic construct
  misc_feature 1..16: note = Description of Artificial Sequence: Syntheticoligonucleotide
  source 1..16: mol_type = other DNA
ttgaatagggctcttt

SEQ ID NO: 231 - DNA, 16 bp, synthetic construct
  misc_feature 1..16: note = Description of Artificial Sequence: Syntheticoligonucleotide
  source 1..16: mol_type = other DNA
ccgtatttattagagc

SEQ ID NO: 232 - DNA, 16 bp, synthetic construct
  misc_feature 1..16: note = Description of Artificial Sequence: Syntheticoligonucleotide
  source 1..16: mol_type = other DNA
agcggatgcattttcc

SEQ ID NO: 233 - DNA, 16 bp, synthetic construct
  misc_feature 1..16: note = Description of Artificial Sequence: Syntheticoligonucleotide
  source 1..16: mol_type = other DNA
tggataggtgagctcg

SEQ ID NO: 234 - DNA, 16 bp, synthetic construct
  misc_feature 1..16: note = Description of Artificial Sequence: Syntheticoligonucleotide
  source 1..16: mol_type = other DNA
ttattctttgcaccac

SEQ ID NO: 235 - DNA, 16 bp, synthetic construct
  misc_feature 1..16: note = Description of Artificial Sequence: Syntheticoligonucleotide
  source 1..16: mol_type = other DNA
tgagatctcaccgtca

SEQ ID NO: 236 - DNA, 16 bp, synthetic construct
  misc_feature 1..16: note = Description of Artificial Sequence: Syntheticoligonucleotide
  source 1..16: mol_type = other DNA
ggtcacatttgaggca

SEQ ID NO: 237 - DNA, 16 bp, synthetic construct
  misc_feature 1..16: note = Description of Artificial Sequence: Syntheticoligonucleotide
  source 1..16: mol_type = other DNA
ctggatggtggtttag

SEQ ID NO: 238 - DNA, 16 bp, synthetic construct
  misc_feature 1..16: note = Description of Artificial Sequence: Syntheticoligonucleotide
  source 1..16: mol_type = other DNA
gtattgacatactggg

SEQ ID NO: 239 - DNA, 16 bp, synthetic construct
  misc_feature 1..16: note = Description of Artificial Sequence: Syntheticoligonucleotide
  source 1..16: mol_type = other DNA
agcgatgatgattgca

SEQ ID NO: 240 - DNA, 16 bp, synthetic construct
  misc_feature 1..16: note = Description of Artificial Sequence: Syntheticoligonucleotide
  source 1..16: mol_type = other DNA
agggaatttgatcagt

SEQ ID NO: 241 - DNA, 16 bp, synthetic construct
  misc_feature 1..16: note = Description of Artificial Sequence: Syntheticoligonucleotide
  source 1..16: mol_type = other DNA
ccaacttaagggtcag

SEQ ID NO: 242 - DNA, 16 bp, synthetic construct
  misc_feature 1..16: note = Description of Artificial Sequence: Syntheticoligonucleotide
  source 1..16: mol_type = other DNA
cgctgtacggtgtgga

SEQ ID NO: 243 - DNA, 16 bp, synthetic construct
  misc_feature 1..16: note = Description of Artificial Sequence: Syntheticoligonucleotide
  source 1..16: mol_type = other DNA
ggctttgggtgcagcc

SEQ ID NO: 244 - DNA, 16 bp, synthetic construct
  misc_feature 1..16: note = Description of Artificial Sequence: Syntheticoligonucleotide
  source 1..16: mol_type = other DNA
gatcatggctgggctc

SEQ ID NO: 245 - DNA, 16 bp, synthetic construct
  misc_feature 1..16: note = Description of Artificial Sequence: Syntheticoligonucleotide
  source 1..16: mol_type = other DNA
tgggtaggagctctgg

SEQ ID NO: 246 - DNA, 16 bp, synthetic construct
  misc_feature 1..16: note = Description of Artificial Sequence: Syntheticoligonucleotide
  source 1..16: mol_type = other DNA
gcctgcatggcactca

SEQ ID NO: 247 - DNA, 16 bp, synthetic construct
  misc_feature 1..16: note = Description of Artificial Sequence: Syntheticoligonucleotide
  source 1..16: mol_type = other DNA
agcagctacgatgcag

SEQ ID NO: 248 - DNA, 16 bp, synthetic construct
  misc_feature 1..16: note = Description of Artificial Sequence: Syntheticoligonucleotide
  source 1..16: mol_type = other DNA
gcaggatggtttctga

SEQ ID NO: 249 - DNA, 16 bp, synthetic construct
  misc_feature 1..16: note = Description of Artificial Sequence: Syntheticoligonucleotide
  source 1..16: mol_type = other DNA
gcacatccagggccta

SEQ ID NO: 250 - DNA, 16 bp, synthetic construct
  misc_feature 1..16: note = Description of Artificial Sequence: Syntheticoligonucleotide
  source 1..16: mol_type = other DNA
agtaatctgtgcgagc

SEQ ID NO: 251 - DNA, 16 bp, synthetic construct
  misc_feature 1..16: note = Description of Artificial Sequence: Syntheticoligonucleotide
  source 1..16: mol_type = other DNA
aattctaacaggccgt

SEQ ID NO: 252 - DNA, 16 bp, synthetic construct
  misc_feature 1..16: note = Description of Artificial Sequence: Syntheticoligonucleotide
  source 1..16: mol_type = other DNA
gtctgcacgggactca

SEQ ID NO: 253 - DNA, 16 bp, synthetic construct
  misc_feature 1..16: note = Description of Artificial Sequence: Syntheticoligonucleotide
  source 1..16: mol_type = other DNA
ataaatgagtagttcc

SEQ ID NO: 254 - DNA, 16 bp, synthetic construct
  misc_feature 1..16: note = Description of Artificial Sequence: Syntheticoligonucleotide
  source 1..16: mol_type = other DNA
gaagatctcggccctg

SEQ ID NO: 255 - DNA, 16 bp, synthetic construct
  misc_feature 1..16: note = Description of Artificial Sequence: Syntheticoligonucleotide
  source 1..16: mol_type = other DNA
aatgagtagttcctct

SEQ ID NO: 256 - DNA, 16 bp, synthetic construct
  misc_feature 1..16: note = Description of Artificial Sequence: Syntheticoligonucleotide
  source 1..16: mol_type = other DNA
accgagaagaaaaacc

SEQ ID NO: 257 - DNA, 16 bp, synthetic construct
  misc_feature 1..16: note = Description of Artificial Sequence: Syntheticoligonucleotide
  source 1..16: mol_type = other DNA
agctgcagctgcgatg

SEQ ID NO: 258 - DNA, 16 bp, synthetic construct
  misc_feature 1..16: note = Description of Artificial Sequence: Syntheticoligonucleotide
  source 1..16: mol_type = other DNA
ttataccgagaagaaa

SEQ ID NO: 259 - DNA, 16 bp, synthetic construct
  misc_feature 1..16: note = Description of Artificial Sequence: Syntheticoligonucleotide
  source 1..16: mol_type = other DNA
tactgaggcaggctct

SEQ ID NO: 260 - DNA, 16 bp, synthetic construct
  misc_feature 1..16: note = Description of Artificial Sequence: Syntheticoligonucleotide
  source 1..16: mol_type = other DNA
ccgcagacctctctct

SEQ ID NO: 261 - DNA, 16 bp, synthetic construct
  misc_feature 1..16: note = Description of Artificial Sequence: Syntheticoligonucleotide
  source 1..16: mol_type = other DNA
aaatgagtagttcctc

SEQ ID NO: 262 - DNA, 16 bp, synthetic construct
  misc_feature 1..16: note = Description of Artificial Sequence: Syntheticoligonucleotide
  source 1..16: mol_type = other DNA
tgccaccatgactagg

SEQ ID NO: 263 - DNA, 16 bp, synthetic construct
  misc_feature 1..16: note = Description of Artificial Sequence: Syntheticoligonucleotide
  source 1..16: mol_type = other DNA
gatgaagccttggtca

SEQ ID NO: 264 - DNA, 16 bp, synthetic construct
  misc_feature 1..16: note = Description of Artificial Sequence: Syntheticoligonucleotide
  source 1..16: mol_type = other DNA
tttgagtgtactgagg

SEQ ID NO: 265 - DNA, 16 bp, synthetic construct
  misc_feature 1..16: note = Description of Artificial Sequence: Syntheticoligonucleotide
  source 1..16: mol_type = other DNA
ggacaggattgtgaca

SEQ ID NO: 266 - DNA, 16 bp, synthetic construct
  misc_feature 1..16: note = Description of Artificial Sequence: Syntheticoligonucleotide
  source 1..16: mol_type = other DNA
gtgcgagcagctgagg

SEQ ID NO: 267 - DNA, 16 bp, synthetic construct
  misc_feature 1..16: note = Description of Artificial Sequence: Syntheticoligonucleotide
  source 1..16: mol_type = other DNA
gcttttataccgagaa

SEQ ID NO: 268 - DNA, 16 bp, synthetic construct
  misc_feature 1..16: note = Description of Artificial Sequence: Syntheticoligonucleotide
  source 1..16: mol_type = other DNA
cgaaagggtgctgtcc

SEQ ID NO: 269 - DNA, 16 bp, synthetic construct
  misc_feature 1..16: note = Description of Artificial Sequence: Syntheticoligonucleotide
  source 1..16: mol_type = other DNA
gccgaaagggtgctgt

SEQ ID NO: 270 - DNA, 16 bp, synthetic construct
  misc_feature 1..16: note = Description of Artificial Sequence: Syntheticoligonucleotide
  source 1..16: mol_type = other DNA
gtgaagtggactgaca

SEQ ID NO: 271 - DNA, 16 bp, synthetic construct
  misc_feature 1..16: note = Description of Artificial Sequence: Syntheticoligonucleotide
  source 1..16: mol_type = other DNA
aaaaaccacgctgtac

SEQ ID NO: 272 - DNA, 16 bp, synthetic construct
  misc_feature 1..16: note = Description of Artificial Sequence: Syntheticoligonucleotide
  source 1..16: mol_type = other DNA
ctaagctgaggcatgg

SEQ ID NO: 273 - DNA, 16 bp, synthetic construct
  misc_feature 1..16: note = Description of Artificial Sequence: Syntheticoligonucleotide
  source 1..16: mol_type = other DNA
ggacacccattccagg

SEQ ID NO: 274 - DNA, 16 bp, synthetic construct
  misc_feature 1..16: note = Description of Artificial Sequence: Syntheticoligonucleotide
  source 1..16: mol_type = other DNA
ggcttgtgggaaactg

SEQ ID NO: 275 - DNA, 16 bp, synthetic construct
  misc_feature 1..16: note = Description of Artificial Sequence: Syntheticoligonucleotide
  source 1..16: mol_type = other DNA
gggcaggcttggtgaa

SEQ ID NO: 276 - DNA, 16 bp, synthetic construct
  misc_feature 1..16: note = Description of Artificial Sequence: Syntheticoligonucleotide
  source 1..16: mol_type = other DNA
gtggaagccgcagacc

SEQ ID NO: 277 - DNA, 16 bp, synthetic construct
  misc_feature 1..16: note = Description of Artificial Sequence: Syntheticoligonucleotide
  source 1..16: mol_type = other DNA
cttgaagtagtccatg

SEQ ID NO: 278 - DNA, 16 bp, synthetic construct
  misc_feature 1..16: note = Description of Artificial Sequence: Syntheticoligonucleotide
  source 1..16: mol_type = other DNA
gtccactgacctgtcc

SEQ ID NO: 279 - DNA, 16 bp, synthetic construct
  misc_feature 1..16: note = Description of Artificial Sequence: Syntheticoligonucleotide
  source 1..16: mol_type = other DNA
tgcgatggcacttgag

SEQ ID NO: 280 - DNA, 16 bp, synthetic construct
  misc_feature 1..16: note = Description of Artificial Sequence: Syntheticoligonucleotide
  source 1..16: mol_type = other DNA
ctcagaggagctcacc

SEQ ID NO: 281 - DNA, 16 bp, synthetic construct
  misc_feature 1..16: note = Description of Artificial Sequence: Syntheticoligonucleotide
  source 1..16: mol_type = other DNA
tggcacttgaggccat

SEQ ID NO: 282 - DNA, 16 bp, synthetic construct
  misc_feature 1..16: note = Description of Artificial Sequence: Syntheticoligonucleotide
  source 1..16: mol_type = other DNA
gctactagggtgaaca

SEQ ID NO: 283 - DNA, 16 bp, synthetic construct
  misc_feature 1..16: note = Description of Artificial Sequence: Syntheticoligonucleotide
  source 1..16: mol_type = other DNA
aatagctaacacttcg

SEQ ID NO: 284 - DNA, 16 bp, synthetic construct
  misc_feature 1..16: note = Description of Artificial Sequence: Syntheticoligonucleotide
  source 1..16: mol_type = other DNA
ggagtaaggacatgac

SEQ ID NO: 285 - DNA, 16 bp, synthetic construct
  misc_feature 1..16: note = Description of Artificial Sequence: Syntheticoligonucleotide
  source 1..16: mol_type = other DNA
atcataagcatcacaa

SEQ ID NO: 286 - DNA, 16 bp, synthetic construct
  misc_feature 1..16: note = Description of Artificial Sequence: Syntheticoligonucleotide
  source 1..16: mol_type = other DNA
tataagttttaacacc

SEQ ID NO: 287 - DNA, 16 bp, synthetic construct
  misc_feature 1..16: note = Description of Artificial Sequence: Syntheticoligonucleotide
  source 1..16: mol_type = other DNA
tgtattgcaaagcaac

SEQ ID NO: 288 - DNA, 16 bp, synthetic construct
  misc_feature 1..16: note = Description of Artificial Sequence: Syntheticoligonucleotide
  source 1..16: mol_type = other DNA
gcatttcggtgaggcc

SEQ ID NO: 289 - DNA, 16 bp, synthetic construct
  misc_feature 1..16: note = Description of Artificial Sequence: Syntheticoligonucleotide
  source 1..16: mol_type = other DNA
tgcctttggtctgggc

SEQ ID NO: 290 - DNA, 16 bp, synthetic construct
  misc_feature 1..16: note = Description of Artificial Sequence: Syntheticoligonucleotide
  source 1..16: mol_type = other DNA
cactatgacaagcccc

SEQ ID NO: 291 - DNA, 16 bp, synthetic construct
  misc_feature 1..16: note = Description of Artificial Sequence: Syntheticoligonucleotide
  source 1..16: mol_type = other DNA
tcccttatggccccca

SEQ ID NO: 292 - DNA, 16 bp, synthetic construct
  misc_feature 1..16: note = Description of Artificial Sequence: Syntheticoligonucleotide
  source 1..16: mol_type = other DNA
ttctattgtcctcacc

SEQ ID NO: 293 - DNA, 16 bp, synthetic construct
  misc_feature 1..16: note = Description of Artificial Sequence: Syntheticoligonucleotide
  source 1..16: mol_type = other DNA
atagacatgaagagtc

SEQ ID NO: 294 - DNA, 16 bp, synthetic construct
  misc_feature 1..16: note = Description of Artificial Sequence: Syntheticoligonucleotide
  source 1..16: mol_type = other DNA
cttaatctgaagctgg

SEQ ID NO: 295 - DNA, 16 bp, synthetic construct
  misc_feature 1..16: note = Description of Artificial Sequence: Syntheticoligonucleotide
  source 1..16: mol_type = other DNA
catcttgccggagctg

SEQ ID NO: 296 - DNA, 16 bp, synthetic construct
  misc_feature 1..16: note = Description of Artificial Sequence: Syntheticoligonucleotide
  source 1..16: mol_type = other DNA
cccatagttgcacccc

SEQ ID NO: 297 - DNA, 16 bp, synthetic construct
  misc_feature 1..16: note = Description of Artificial Sequence: Syntheticoligonucleotide
  source 1..16: mol_type = other DNA
actacaatacggcctc

SEQ ID NO: 298 - DNA, 16 bp, synthetic construct
  misc_feature 1..16: note = Description of Artificial Sequence: Syntheticoligonucleotide
  source 1..16: mol_type = other DNA
gcccattcaccgtcca

SEQ ID NO: 299 - DNA, 16 bp, synthetic construct
  misc_feature 1..16: note = Description of Artificial Sequence: Syntheticoligonucleotide
  source 1..16: mol_type = other DNA
tctttaaggttctgca

SEQ ID NO: 300 - DNA, 16 bp, synthetic construct
  misc_feature 1..16: note = Description of Artificial Sequence: Syntheticoligonucleotide
  source 1..16: mol_type = other DNA
ggtagactggcacagg

SEQ ID NO: 301 - DNA, 16 bp, synthetic construct
  misc_feature 1..16: note = Description of Artificial Sequence: Syntheticoligonucleotide
  source 1..16: mol_type = other DNA
tattatacatacgaga

SEQ ID NO: 302 - DNA, 16 bp, synthetic construct
  misc_feature 1..16: note = Description of Artificial Sequence: Syntheticoligonucleotide
  source 1..16: mol_type = other DNA
agattttgatcaagac

SEQ ID NO: 303 - DNA, 16 bp, synthetic construct
  misc_feature 1..16: note = Description of Artificial Sequence: Syntheticoligonucleotide
  source 1..16: mol_type = other DNA
gaagattccatgcagg

SEQ ID NO: 304 - DNA, 16 bp, synthetic construct
  misc_feature 1..16: note = Description of Artificial Sequence: Syntheticoligonucleotide
  source 1..16: mol_type = other DNA
cgcactatccctatcc

SEQ ID NO: 305 - DNA, 16 bp, synthetic construct
  misc_feature 1..16: note = Description of Artificial Sequence: Syntheticoligonucleotide
  source 1..16: mol_type = other DNA
aggttaggttccctgc

SEQ ID NO: 306 - DNA, 16 bp, synthetic construct
  misc_feature 1..16: note = Description of Artificial Sequence: Syntheticoligonucleotide
  source 1..16: mol_type = other DNA
gctttaacaactcagg

SEQ ID NO: 307 - DNA, 16 bp, synthetic construct
  misc_feature 1..16: note = Description of Artificial Sequence: Syntheticoligonucleotide
  source 1..16: mol_type = other DNA
ggttatgtggcaccct

SEQ ID NO: 308 - DNA, 16 bp, synthetic construct
  misc_feature 1..16: note = Description of Artificial Sequence: Syntheticoligonucleotide
  source 1..16: mol_type = other DNA
ttattagagcacaggt

SEQ ID NO: 309 - DNA, 16 bp, synthetic construct
  misc_feature 1..16: note = Description of Artificial Sequence: Syntheticoligonucleotide
  source 1..16: mol_type = other DNA
tggaatcccacaaaac

SEQ ID NO: 310 - DNA, 16 bp, synthetic construct
  misc_feature 1..16: note = Description of Artificial Sequence: Syntheticoligonucleotide
  source 1..16: mol_type = other DNA
tacttagcagggtccc

SEQ ID NO: 311 - DNA, 16 bp, synthetic construct
  misc_feature 1..16: note = Description of Artificial Sequence: Syntheticoligonucleotide
  source 1..16: mol_type = other DNA
gtggataggtgagctc

SEQ ID NO: 312 - DNA, 16 bp, synthetic construct
  misc_feature 1..16: note = Description of Artificial Sequence: Syntheticoligonucleotide
  source 1..16: mol_type = other DNA
tgacataagttgtatc

SEQ ID NO: 313 - DNA, 16 bp, synthetic construct
  misc_feature 1..16: note = Description of Artificial Sequence: Syntheticoligonucleotide
  source 1..16: mol_type = other DNA
atgaatcaagccccat

SEQ ID NO: 314 - DNA, 16 bp, synthetic construct
  misc_feature 1..16: note = Description of Artificial Sequence: Syntheticoligonucleotide
  source 1..16: mol_type = other DNA
tggatttgcggacagg

SEQ ID NO: 315 - DNA, 16 bp, synthetic construct
  misc_feature 1..16: note = Description of Artificial Sequence: Syntheticoligonucleotide
  source 1..16: mol_type = other DNA
cagaatttggcatgct

SEQ ID NO: 316 - DNA, 16 bp, synthetic construct
  misc_feature 1..16: note = Description of Artificial Sequence: Syntheticoligonucleotide
  source 1..16: mol_type = other DNA
gtgtattgacatactg

SEQ ID NO: 317 - DNA, 16 bp, synthetic construct
  misc_feature 1..16: note = Description of Artificial Sequence: Syntheticoligonucleotide
  source 1..16: mol_type = other DNA
ggattacagagtcagc

SEQ ID NO: 318 - DNA, 16 bp, synthetic construct
  misc_feature 1..16: note = Description of Artificial Sequence: Syntheticoligonucleotide
  source 1..16: mol_type = other DNA
tggttaggtggttagg

SEQ ID NO: 319 - DNA, 16 bp, synthetic construct
  misc_feature 1..16: note = Description of Artificial Sequence: Syntheticoligonucleotide
  source 1..16: mol_type = other DNA
gggtatggttgttctg

SEQ ID NO: 320 - DNA, 16 bp, synthetic construct
  misc_feature 1..16: note = Description of Artificial Sequence: Syntheticoligonucleotide
  source 1..16: mol_type = other DNA
ttcgatgagtgtgtgc

SEQ ID NO: 321 - DNA, 16 bp, synthetic construct
  misc_feature 1..16: note = Description of Artificial Sequence: Syntheticoligonucleotide
  source 1..16: mol_type = other DNA
ctggcttgtgggaaac

SEQ ID NO: 322 - DNA, 16 bp, synthetic construct
  misc_feature 1..16: note = Description of Artificial Sequence: Syntheticoligonucleotide
  source 1..16: mol_type = other DNA
tggaaggttccccctg

SEQ ID NO: 323 - DNA, 16 bp, synthetic construct
  misc_feature 1..16: note = Description of Artificial Sequence: Syntheticoligonucleotide
  source 1..16: mol_type = other DNA
cccggagggtgccacc

SEQ ID NO: 324 - DNA, 16 bp, synthetic construct
  misc_feature 1..16: note = Description of Artificial Sequence: Syntheticoligonucleotide
  source 1..16: mol_type = other DNA
agaccccagtggcggt

SEQ ID NO: 325 - DNA, 16 bp, synthetic construct
  misc_feature 1..16: note = Description of Artificial Sequence: Syntheticoligonucleotide
  source 1..16: mol_type = other DNA
cagtgggtaggagctc

SEQ ID NO: 326 - DNA, 16 bp, synthetic construct
  misc_feature 1..16: note = Description of Artificial Sequence: Syntheticoligonucleotide
  source 1..16: mol_type = other DNA
acattgtgccctgccc

SEQ ID NO: 327 - DNA, 16 bp, synthetic construct
  misc_feature 1..16: note = Description of Artificial Sequence: Syntheticoligonucleotide
  source 1..16: mol_type = other DNA
gacgacagggccttgg

SEQ ID NO: 328 - DNA, 16 bp, synthetic construct
  misc_feature 1..16: note = Description of Artificial Sequence: Syntheticoligonucleotide
  source 1..16: mol_type = other DNA
catgttgtggaacttg

SEQ ID NO: 329 - DNA, 16 bp, synthetic construct
  misc_feature 1..16: note = Description of Artificial Sequence: Syntheticoligonucleotide
  source 1..16: mol_type = other DNA
cgtttcttgcggaact

SEQ ID NO: 330 - DNA, 16 bp, synthetic construct
  misc_feature 1..16: note = Description of Artificial Sequence: Syntheticoligonucleotide
  source 1..16: mol_type = other DNA
agtggaaacctcactt

SEQ ID NO: 331 - DNA, 16 bp, synthetic construct
  misc_feature 1..16: note = Description of Artificial Sequence: Syntheticoligonucleotide
  source 1..16: mol_type = other DNA
gacaggattgtgacat

SEQ ID NO: 332 - DNA, 16 bp, synthetic construct
  misc_feature 1..16: note = Description of Artificial Sequence: Syntheticoligonucleotide
  source 1..16: mol_type = other DNA
gcacacccctgtgttg

SEQ ID NO: 333 - DNA, 16 bp, synthetic construct
  misc_feature 1..16: note = Description of Artificial Sequence: Syntheticoligonucleotide
  source 1..16: mol_type = other DNA
tggcaaggcagtgtgt

SEQ ID NO: 334 - DNA, 16 bp, synthetic construct
  misc_feature 1..16: note = Description of Artificial Sequence: Syntheticoligonucleotide
  source 1..16: mol_type = other DNA
actgacctgtccttcc

SEQ ID NO: 335 - DNA, 16 bp, synthetic construct
  misc_feature 1..16: note = Description of Artificial Sequence: Syntheticoligonucleotide
  source 1..16: mol_type = other DNA
gcgatggcacttgagg

SEQ ID NO: 336 - DNA, 16 bp, synthetic construct
  misc_feature 1..16: note = Description of Artificial Sequence: Syntheticoligonucleotide
  source 1..16: mol_type = other DNA
tacctggctggaatca

SEQ ID NO: 337 - DNA, 16 bp, synthetic construct
  misc_feature 1..16: note = Description of Artificial Sequence: Syntheticoligonucleotide
  source 1..16: mol_type = other DNA
acagcatttcaagttg

SEQ ID NO: 338 - DNA, 16 bp, synthetic construct
  misc_feature 1..16: note = Description of Artificial Sequence: Syntheticoligonucleotide
  source 1..16: mol_type = other DNA
gatcgatggagtgtgg

SEQ ID NO: 339 - DNA, 16 bp, synthetic construct
  misc_feature 1..16: note = Description of Artificial Sequence: Syntheticoligonucleotide
  source 1..16: mol_type = other DNA
aatgtaaaggtcctcg

SEQ ID NO: 340 - DNA, 16 bp, synthetic construct
  misc_feature 1..16: note = Description of Artificial Sequence: Syntheticoligonucleotide
  source 1..16: mol_type = other DNA
aaagcgatacaagcaa

SEQ ID NO: 341 - DNA, 16 bp, synthetic construct
  misc_feature 1..16: note = Description of Artificial Sequence: Syntheticoligonucleotide
  source 1..16: mol_type = other DNA
agccctgaacaacctg

SEQ ID NO: 342 - DNA, 16 bp, synthetic construct
  misc_feature 1..16: note = Description of Artificial Sequence: Syntheticoligonucleotide
  source 1..16: mol_type = other DNA
cggcacttggtcaaat

SEQ ID NO: 343 - DNA, 16 bp, synthetic construct
  misc_feature 1..16: note = Description of Artificial Sequence: Syntheticoligonucleotide
  source 1..16: mol_type = other DNA
ataggacaaccttttg

SEQ ID NO: 344 - DNA, 16 bp, synthetic construct
  misc_feature 1..16: note = Description of Artificial Sequence: Syntheticoligonucleotide
  source 1..16: mol_type = other DNA
ctattaggagtaagga

SEQ ID NO: 345 - DNA, 16 bp, synthetic construct
  misc_feature 1..16: note = Description of Artificial Sequence: Syntheticoligonucleotide
  source 1..16: mol_type = other DNA
tatatgtaatggctga

SEQ ID NO: 346 - DNA, 16 bp, synthetic construct
  misc_feature 1..16: note = Description of Artificial Sequence: Syntheticoligonucleotide
  source 1..16: mol_type = other DNA
cctctatagtaaatgg

SEQ ID NO: 347 - DNA, 16 bp, synthetic construct
  misc_feature 1..16: note = Description of Artificial Sequence: Syntheticoligonucleotide
  source 1..16: mol_type = other DNA
gctaagtatttactgt

SEQ ID NO: 348 - DNA, 16 bp, synthetic construct
  misc_feature 1..16: note = Description of Artificial Sequence: Syntheticoligonucleotide
  source 1..16: mol_type = other DNA
aatagtcagtccatta

SEQ ID NO: 349 - DNA, 16 bp, synthetic construct
  misc_feature 1..16: note = Description of Artificial Sequence: Syntheticoligonucleotide
  source 1..16: mol_type = other DNA
gaaagcttggacatgg

SEQ ID NO: 350 - DNA, 16 bp, synthetic construct
  misc_feature 1..16: note = Description of Artificial Sequence: Syntheticoligonucleotide
  source 1..16: mol_type = other DNA
gcgagaggaggattgc

SEQ ID NO: 351 - DNA, 16 bp, synthetic construct
  misc_feature 1..16: note = Description of Artificial Sequence: Syntheticoligonucleotide
  source 1..16: mol_type = other DNA
attaggtgtctgcagg

SEQ ID NO: 352 - DNA, 16 bp, synthetic construct
  misc_feature 1..16: note = Description of Artificial Sequence: Syntheticoligonucleotide
  source 1..16: mol_type = other DNA
gagatctaggcttgga

SEQ ID NO: 353 - DNA, 16 bp, synthetic construct
  misc_feature 1..16: note = Description of Artificial Sequence: Syntheticoligonucleotide
  source 1..16: mol_type = other DNA
atcaccacgctctggc

SEQ ID NO: 354 - DNA, 16 bp, synthetic construct
  misc_feature 1..16: note = Description of Artificial Sequence: Syntheticoligonucleotide
  source 1..16: mol_type = other DNA
ccaaatacatggccac

SEQ ID NO: 355 - DNA, 16 bp, synthetic construct
  misc_feature 1..16: note = Description of Artificial Sequence: Syntheticoligonucleotide
  source 1..16: mol_type = other DNA
atcatagaacagcatt

SEQ ID NO: 356 - DNA, 16 bp, synthetic construct
  misc_feature 1..16: note = Description of Artificial Sequence: Syntheticoligonucleotide
  source 1..16: mol_type = other DNA
agacctggcccttctt

SEQ ID NO: 357 - DNA, 16 bp, synthetic construct
  misc_feature 1..16: note = Description of Artificial Sequence: Syntheticoligonucleotide
  source 1..16: mol_type = other DNA
ccgggcttcatcgaca

SEQ ID NO: 358 - DNA, 16 bp, synthetic construct
  misc_feature 1..16: note = Description of Artificial Sequence: Syntheticoligonucleotide
  source 1..16: mol_type = other DNA
tccctttctgactggg

SEQ ID NO: 359 - DNA, 16 bp, synthetic construct
  misc_feature 1..16: note = Description of Artificial Sequence: Syntheticoligonucleotide
  source 1..16: mol_type = other DNA
agagctaagaattctc

SEQ ID NO: 360 - DNA, 16 bp, synthetic construct
  misc_feature 1..16: note = Description of Artificial Sequence: Syntheticoligonucleotide
  source 1..16: mol_type = other DNA
ctgggagagcactggt

SEQ ID NO: 361 - DNA, 16 bp, synthetic construct
  misc_feature 1..16: note = Description of Artificial Sequence: Syntheticoligonucleotide
  source 1..16: mol_type = other DNA
gtatagaagggttctg

SEQ ID NO: 362 - DNA, 16 bp, synthetic construct
  misc_feature 1..16: note = Description of Artificial Sequence: Syntheticoligonucleotide
  source 1..16: mol_type = other DNA
cagccaaccccattat

SEQ ID NO: 363 - DNA, 16 bp, synthetic construct
  misc_feature 1..16: note = Description of Artificial Sequence: Syntheticoligonucleotide
  source 1..16: mol_type = other DNA
ctgtccaagccacgca

SEQ ID NO: 364 - DNA, 16 bp, synthetic construct
  misc_feature 1..16: note = Description of Artificial Sequence: Syntheticoligonucleotide
  source 1..16: mol_type = other DNA
aggaggcgagtccagg

SEQ ID NO: 365 - DNA, 16 bp, synthetic construct
  misc_feature 1..16: note = Description of Artificial Sequence: Syntheticoligonucleotide
  source 1..16: mol_type = other DNA
aaggaccgagctgaca

SEQ ID NO: 366 - DNA, 16 bp, synthetic construct
  misc_feature 1..16: note = Description of Artificial Sequence: Syntheticoligonucleotide
  source 1..16: mol_type = other DNA
gcgagaagtgggtaga

SEQ ID NO: 367 - DNA, 16 bp, synthetic construct
  misc_feature 1..16: note = Description of Artificial Sequence: Syntheticoligonucleotide
  source 1..16: mol_type = other DNA
tcctcggagtcctatt

SEQ ID NO: 368 - DNA, 16 bp, synthetic construct
  misc_feature 1..16: note = Description of Artificial Sequence: Syntheticoligonucleotide
  source 1..16: mol_type = other DNA
ggcttgcctgcccacg

SEQ ID NO: 369 - DNA, 16 bp, synthetic construct
  misc_feature 1..16: note = Description of Artificial Sequence: Syntheticoligonucleotide
  source 1..16: mol_type = other DNA
gtccaggtaccccacc

SEQ ID NO: 370 - DNA, 16 bp, synthetic construct
  misc_feature 1..16: note = Description of Artificial Sequence: Syntheticoligonucleotide
  source 1..16: mol_type = other DNA
acaatacggcctcctc

SEQ ID NO: 371 - DNA, 16 bp, synthetic construct
  misc_feature 1..16: note = Description of Artificial Sequence: Syntheticoligonucleotide
  source 1..16: mol_type = other DNA
actgcaagcccacatg

SEQ ID NO: 372 - DNA, 16 bp, synthetic construct
  misc_feature 1..16: note = Description of Artificial Sequence: Syntheticoligonucleotide
  source 1..16: mol_type = other DNA
ctgaggtgttaccagg

SEQ ID NO: 373 - DNA, 16 bp, synthetic construct
  misc_feature 1..16: note = Description of Artificial Sequence: Syntheticoligonucleotide
  source 1..16: mol_type = other DNA
ctgcatctttaaggtt

SEQ ID NO: 374 - DNA, 16 bp, synthetic construct
  misc_feature 1..16: note = Description of Artificial Sequence: Syntheticoligonucleotide
  source 1..16: mol_type = other DNA
gcttaaagacggccat

SEQ ID NO: 375 - DNA, 16 bp, synthetic construct
  misc_feature 1..16: note = Description of Artificial Sequence: Syntheticoligonucleotide
  source 1..16: mol_type = other DNA
acttattgggatgaag

SEQ ID NO: 376 - DNA, 16 bp, synthetic construct
  misc_feature 1..16: note = Description of Artificial Sequence: Syntheticoligonucleotide
  source 1..16: mol_type = other DNA
gtagcagggcaaagca

SEQ ID NO: 377 - DNA, 16 bp, synthetic construct
  misc_feature 1..16: note = Description of Artificial Sequence: Syntheticoligonucleotide
  source 1..16: mol_type = other DNA
taagggttgtgtgtag

SEQ ID NO: 378 - DNA, 16 bp, synthetic construct
  misc_feature 1..16: note = Description of Artificial Sequence: Syntheticoligonucleotide
  source 1..16: mol_type = other DNA
tgcctaagtagggaga

SEQ ID NO: 379 - DNA, 16 bp, synthetic construct
  misc_feature 1..16: note = Description of Artificial Sequence: Syntheticoligonucleotide
  source 1..16: mol_type = other DNA
aggctacggtcttccc

SEQ ID NO: 380 - DNA, 16 bp, synthetic construct
  misc_feature 1..16: note = Description of Artificial Sequence: Syntheticoligonucleotide
  source 1..16: mol_type = other DNA
agagggtttgtaagta

SEQ ID NO: 381 - DNA, 16 bp, synthetic construct
  misc_feature 1..16: note = Description of Artificial Sequence: Syntheticoligonucleotide
  source 1..16: mol_type = other DNA
ataaattaccaccagc

SEQ ID NO: 382 - DNA, 16 bp, synthetic construct
  misc_feature 1..16: note = Description of Artificial Sequence: Syntheticoligonucleotide
  source 1..16: mol_type = other DNA
tttcaaagcaaggacg

SEQ ID NO: 383 - DNA, 16 bp, synthetic construct
  misc_feature 1..16: note = Description of Artificial Sequence: Syntheticoligonucleotide
  source 1..16: mol_type = other DNA
atggagctcctttgca

SEQ ID NO: 384 - DNA, 16 bp, synthetic construct
  misc_feature 1..16: note = Description of Artificial Sequence: Syntheticoligonucleotide
  source 1..16: mol_type = other DNA
aggcatggccccaatc

SEQ ID NO: 385 - DNA, 16 bp, synthetic construct
  misc_feature 1..16: note = Description of Artificial Sequence: Syntheticoligonucleotide
  source 1..16: mol_type = other DNA
gctcctggaattactt

SEQ ID NO: 386 - DNA, 16 bp, synthetic construct
  misc_feature 1..16: note = Description of Artificial Sequence: Syntheticoligonucleotide
  source 1..16: mol_type = other DNA
gctaagcccacaggcc

SEQ ID NO: 387 - DNA, 16 bp, synthetic construct
  misc_feature 1..16: note = Description of Artificial Sequence: Syntheticoligonucleotide
  source 1..16: mol_type = other DNA
tgaaaagaagcggagt

SEQ ID NO: 388 - DNA, 16 bp, synthetic construct
  misc_feature 1..16: note = Description of Artificial Sequence: Syntheticoligonucleotide
  source 1..16: mol_type = other DNA
cgtcaacacccgtgtc

SEQ ID NO: 389 - DNA, 16 bp, synthetic construct
  misc_feature 1..16: note = Description of Artificial Sequence: Syntheticoligonucleotide
  source 1..16: mol_type = other DNA
gcaggacctcctagct

SEQ ID NO: 390 - DNA, 16 bp, synthetic construct
  misc_feature 1..16: note = Description of Artificial Sequence: Syntheticoligonucleotide
  source 1..16: mol_type = other DNA
ggaatggaggaaccca

SEQ ID NO: 391 - DNA, 16 bp, synthetic construct
  misc_feature 1..16: note = Description of Artificial Sequence: Syntheticoligonucleotide
  source 1..16: mol_type = other DNA
tccaggagagggttag

SEQ ID NO: 392 - DNA, 16 bp, synthetic construct
  misc_feature 1..16: note = Description of Artificial Sequence: Syntheticoligonucleotide
  source 1..16: mol_type = other DNA
atcaaatgggtgttac

SEQ ID NO: 393 - DNA, 16 bp, synthetic construct
  misc_feature 1..16: note = Description of Artificial Sequence: Syntheticoligonucleotide
  source 1..16: mol_type = other DNA
agtcagcgatgatgat

SEQ ID NO: 394 - DNA, 16 bp, synthetic construct
  misc_feature 1..16: note = Description of Artificial Sequence: Syntheticoligonucleotide
  source 1..16: mol_type = other DNA
gaattatcgagtatct

SEQ ID NO: 395 - DNA, 16 bp, synthetic construct
  misc_feature 1..16: note = Description of Artificial Sequence: Syntheticoligonucleotide
  source 1..16: mol_type = other DNA
aagggatcaggactga

SEQ ID NO: 396 - DNA, 16 bp, synthetic construct
  misc_feature 1..16: note = Description of Artificial Sequence: Syntheticoligonucleotide
  source 1..16: mol_type = other DNA
tttcgatgagtgtgtg

SEQ ID NO: 397 - DNA, 16 bp, synthetic construct
  misc_feature 1..16: note = Description of Artificial Sequence: Syntheticoligonucleotide
  source 1..16: mol_type = other DNA
cctggcttgtgggaaa

SEQ ID NO: 398 - DNA, 16 bp, synthetic construct
  misc_feature 1..16: note = Description of Artificial Sequence: Syntheticoligonucleotide
  source 1..16: mol_type = other DNA
ctggaaggttccccct

SEQ ID NO: 399 - DNA, 16 bp, synthetic construct
  misc_feature 1..16: note = Description of Artificial Sequence: Syntheticoligonucleotide
  source 1..16: mol_type = other DNA
gccccggagggtgcca

SEQ ID NO: 400 - DNA, 16 bp, synthetic construct
  misc_feature 1..16: note = Description of Artificial Sequence: Syntheticoligonucleotide
  source 1..16: mol_type = other DNA
aagaccccagtggcgg

SEQ ID NO: 401 - DNA, 16 bp, synthetic construct
  misc_feature 1..16: note = Description of Artificial Sequence: Syntheticoligonucleotide
  source 1..16: mol_type = other DNA
agcagtgggtaggagc

SEQ ID NO: 402 - DNA, 16 bp, synthetic construct
  misc_feature 1..16: note = Description of Artificial Sequence: Syntheticoligonucleotide
  source 1..16: mol_type = other DNA
ggaggagacattgtgc

SEQ ID NO: 403 - DNA, 16 bp, synthetic construct
  misc_feature 1..16: note = Description of Artificial Sequence: Syntheticoligonucleotide
  source 1..16: mol_type = other DNA
ggacgacagggccttg

SEQ ID NO: 404 - DNA, 16 bp, synthetic construct
  misc_feature 1..16: note = Description of Artificial Sequence: Syntheticoligonucleotide
  source 1..16: mol_type = other DNA
cgcatgttgtggaact

SEQ ID NO: 405 - DNA, 16 bp, synthetic construct
  misc_feature 1..16: note = Description of Artificial Sequence: Syntheticoligonucleotide
  source 1..16: mol_type = other DNA
ctccgtttcttgcgga

SEQ ID NO: 406 - DNA, 16 bp, synthetic construct
  misc_feature 1..16: note = Description of Artificial Sequence: Syntheticoligonucleotide
  source 1..16: mol_type = other DNA
cagtggaaacctcact

SEQ ID NO: 407 - DNA, 16 bp, synthetic construct
  misc_feature 1..16: note = Description of Artificial Sequence: Syntheticoligonucleotide
  source 1..16: mol_type = other DNA
gagggacaggattgtg

SEQ ID NO: 408 - DNA, 16 bp, synthetic construct
  misc_feature 1..16: note = Description of Artificial Sequence: Syntheticoligonucleotide
  source 1..16: mol_type = other DNA
gggcacacccctgtgt

SEQ ID NO: 409 - DNA, 16 bp, synthetic construct
  misc_feature 1..16: note = Description of Artificial Sequence: Syntheticoligonucleotide
  source 1..16: mol_type = other DNA
ttggcaaggcagtgtg

SEQ ID NO: 410 - DNA, 16 bp, synthetic construct
  misc_feature 1..16: note = Description of Artificial Sequence: Syntheticoligonucleotide
  source 1..16: mol_type = other DNA
cactgacctgtccttc

SEQ ID NO: 411 - DNA, 16 bp, synthetic construct
  misc_feature 1..16: note = Description of Artificial Sequence: Syntheticoligonucleotide
  source 1..16: mol_type = other DNA
ctgcgatggcacttga

SEQ ID NO: 412 - DNA, 16 bp, synthetic construct
  misc_feature 1..16: note = Description of Artificial Sequence: Syntheticoligonucleotide
  source 1..16: mol_type = other DNA
ttacctggctggaatc

SEQ ID NO: 413 - DNA, 16 bp, synthetic construct
  misc_feature 1..16: note = Description of Artificial Sequence: Syntheticoligonucleotide
  source 1..16: mol_type = other DNA
gacagcatttcaagtt

SEQ ID NO: 414 - DNA, 16 bp, synthetic construct
  misc_feature 1..16: note = Description of Artificial Sequence: Syntheticoligonucleotide
  source 1..16: mol_type = other DNA
agatcgatggagtgtg

SEQ ID NO: 415 - DNA, 16 bp, synthetic construct
  misc_feature 1..16: note = Description of Artificial Sequence: Syntheticoligonucleotide
  source 1..16: mol_type = other DNA
aaatgtaaaggtcctc

SEQ ID NO: 416 - DNA, 16 bp, synthetic construct
  misc_feature 1..16: note = Description of Artificial Sequence: Syntheticoligonucleotide
  source 1..16: mol_type = other DNA
taaagcgatacaagca

SEQ ID NO: 417 - DNA, 16 bp, synthetic construct
  misc_feature 1..16: note = Description of Artificial Sequence: Syntheticoligonucleotide
  source 1..16: mol_type = other DNA
cagccctgaacaacct

SEQ ID NO: 418 - DNA, 16 bp, synthetic construct
  misc_feature 1..16: note = Description of Artificial Sequence: Syntheticoligonucleotide
  source 1..16: mol_type = other DNA
atcggcacttggtcaa

SEQ ID NO: 419 - DNA, 16 bp, synthetic construct
  misc_feature 1..16: note = Description of Artificial Sequence: Syntheticoligonucleotide
  source 1..16: mol_type = other DNA
aataggacaacctttt

SEQ ID NO: 420 - DNA, 16 bp, synthetic construct
  misc_feature 1..16: note = Description of Artificial Sequence: Syntheticoligonucleotide
  source 1..16: mol_type = other DNA
cctattaggagtaagg

SEQ ID NO: 421 - DNA, 16 bp, synthetic construct
  misc_feature 1..16: note = Description of Artificial Sequence: Syntheticoligonucleotide
  source 1..16: mol_type = other DNA
atatatgtaatggctg

SEQ ID NO: 422 - DNA, 16 bp, synthetic construct
  misc_feature 1..16: note = Description of Artificial Sequence: Syntheticoligonucleotide
  source 1..16: mol_type = other DNA
acctctatagtaaatg

SEQ ID NO: 423 - DNA, 16 bp, synthetic construct
  misc_feature 1..16: note = Description of Artificial Sequence: Syntheticoligonucleotide
  source 1..16: mol_type = other DNA
ggtttattgtgtgtca

SEQ ID NO: 424 - DNA, 16 bp, synthetic construct
  misc_feature 1..16: note = Description of Artificial Sequence: Syntheticoligonucleotide
  source 1..16: mol_type = other DNA
gaatagtcagtccatt

SEQ ID NO: 425 - DNA, 16 bp, synthetic construct
  misc_feature 1..16: note = Description of Artificial Sequence: Syntheticoligonucleotide
  source 1..16: mol_type = other DNA
tagaaagcttggacat

SEQ ID NO: 426 - DNA, 16 bp, synthetic construct
  misc_feature 1..16: note = Description of Artificial Sequence: Syntheticoligonucleotide
  source 1..16: mol_type = other DNA
gtgcgagaggaggatt

SEQ ID NO: 427 - DNA, 16 bp, synthetic construct
  misc_feature 1..16: note = Description of Artificial Sequence: Syntheticoligonucleotide
  source 1..16: mol_type = other DNA
cattaggtgtctgcag

SEQ ID NO: 428 - DNA, 16 bp, synthetic construct
  misc_feature 1..16: note = Description of Artificial Sequence: Syntheticoligonucleotide
  source 1..16: mol_type = other DNA
tgagatctaggcttgg

SEQ ID NO: 429 - DNA, 16 bp, synthetic construct
  misc_feature 1..16: note = Description of Artificial Sequence: Syntheticoligonucleotide
  source 1..16: mol_type = other DNA
catcaccacgctctgg

SEQ ID NO: 430 - DNA, 16 bp, synthetic construct
  misc_feature 1..16: note = Description of Artificial Sequence: Syntheticoligonucleotide
  source 1..16: mol_type = other DNA
cccaaatacatggcca

SEQ ID NO: 431 - DNA, 16 bp, synthetic construct
  misc_feature 1..16: note = Description of Artificial Sequence: Syntheticoligonucleotide
  source 1..16: mol_type = other DNA
gaatcatagaacagca

SEQ ID NO: 432 - DNA, 16 bp, synthetic construct
  misc_feature 1..16: note = Description of Artificial Sequence: Syntheticoligonucleotide
  source 1..16: mol_type = other DNA
tctgaagacctggccc

SEQ ID NO: 433 - DNA, 16 bp, synthetic construct
  misc_feature 1..16: note = Description of Artificial Sequence: Syntheticoligonucleotide
  source 1..16: mol_type = other DNA
tgcgccgggcttcatc

SEQ ID NO: 434 - DNA, 16 bp, synthetic construct
  misc_feature 1..16: note = Description of Artificial Sequence: Syntheticoligonucleotide
  source 1..16: mol_type = other DNA
ctgcactgtctgttgg

SEQ ID NO: 435 - DNA, 16 bp, synthetic construct
  misc_feature 1..16: note = Description of Artificial Sequence: Syntheticoligonucleotide
  source 1..16: mol_type = other DNA
ccagagctaagaattc

SEQ ID NO: 436 - DNA, 16 bp, synthetic construct
  misc_feature 1..16: note = Description of Artificial Sequence: Syntheticoligonucleotide
  source 1..16: mol_type = other DNA
ggcctgggagagcact

SEQ ID NO: 437 - DNA, 16 bp, synthetic construct
  misc_feature 1..16: note = Description of Artificial Sequence: Syntheticoligonucleotide
  source 1..16: mol_type = other DNA
gagtatagaagggttc

SEQ ID NO: 438 - DNA, 16 bp, synthetic construct
  misc_feature 1..16: note = Description of Artificial Sequence: Syntheticoligonucleotide
  source 1..16: mol_type = other DNA
tggaagggactgccca

SEQ ID NO: 439 - DNA, 16 bp, synthetic construct
  misc_feature 1..16: note = Description of Artificial Sequence: Syntheticoligonucleotide
  source 1..16: mol_type = other DNA
cctgtccaagccacgc

SEQ ID NO: 440 - DNA, 16 bp, synthetic construct
  misc_feature 1..16: note = Description of Artificial Sequence: Syntheticoligonucleotide
  source 1..16: mol_type = other DNA
aaggaggcgagtccag

SEQ ID NO: 441 - DNA, 16 bp, synthetic construct
  misc_feature 1..16: note = Description of Artificial Sequence: Syntheticoligonucleotide
  source 1..16: mol_type = other DNA
gaaggaccgagctgac

SEQ ID NO: 442 - DNA, 16 bp, synthetic construct
  misc_feature 1..16: note = Description of Artificial Sequence: Syntheticoligonucleotide
  source 1..16: mol_type = other DNA
aggcgagaagtgggta

SEQ ID NO: 443 - DNA, 16 bp, synthetic construct
  misc_feature 1..16: note = Description of Artificial Sequence: Syntheticoligonucleotide
  source 1..16: mol_type = other DNA
ctcctcggagtcctat

SEQ ID NO: 444 - DNA, 16 bp, synthetic construct
  misc_feature 1..16: note = Description of Artificial Sequence: Syntheticoligonucleotide
  source 1..16: mol_type = other DNA
gcacctggcttgcctg

SEQ ID NO: 445 - DNA, 16 bp, synthetic construct
  misc_feature 1..16: note = Description of Artificial Sequence: Syntheticoligonucleotide
  source 1..16: mol_type = other DNA
cggcacctgtaggtcc

SEQ ID NO: 446 - DNA, 16 bp, synthetic construct
  misc_feature 1..16: note = Description of Artificial Sequence: Syntheticoligonucleotide
  source 1..16: mol_type = other DNA
tacaatacggcctcct

SEQ ID NO: 447 - DNA, 16 bp, synthetic construct
  misc_feature 1..16: note = Description of Artificial Sequence: Syntheticoligonucleotide
  source 1..16: mol_type = other DNA
cactgcaagcccacat

SEQ ID NO: 448 - DNA, 16 bp, synthetic construct
  misc_feature 1..16: note = Description of Artificial Sequence: Syntheticoligonucleotide
  source 1..16: mol_type = other DNA
gctgaggtgttaccag

SEQ ID NO: 449 - DNA, 16 bp, synthetic construct
  misc_feature 1..16: note = Description of Artificial Sequence: Syntheticoligonucleotide
  source 1..16: mol_type = other DNA
gattttgacattctgc

SEQ ID NO: 450 - DNA, 16 bp, synthetic construct
  misc_feature 1..16: note = Description of Artificial Sequence: Syntheticoligonucleotide
  source 1..16: mol_type = other DNA
agcttaaagacggcca

SEQ ID NO: 451 - DNA, 16 bp, synthetic construct
  misc_feature 1..16: note = Description of Artificial Sequence: Syntheticoligonucleotide
  source 1..16: mol_type = other DNA
tacttattgggatgaa

SEQ ID NO: 452 - DNA, 16 bp, synthetic construct
  misc_feature 1..16: note = Description of Artificial Sequence: Syntheticoligonucleotide
  source 1..16: mol_type = other DNA
gagtagcagggcaaag

SEQ ID NO: 453 - DNA, 16 bp, synthetic construct
  misc_feature 1..16: note = Description of Artificial Sequence: Syntheticoligonucleotide
  source 1..16: mol_type = other DNA
ctaagggttgtgtgta

SEQ ID NO: 454 - DNA, 16 bp, synthetic construct
  misc_feature 1..16: note = Description of Artificial Sequence: Syntheticoligonucleotide
  source 1..16: mol_type = other DNA
gtgcctaagtagggag

SEQ ID NO: 455 - DNA, 16 bp, synthetic construct
  misc_feature 1..16: note = Description of Artificial Sequence: Syntheticoligonucleotide
  source 1..16: mol_type = other DNA
caggctacggtcttcc

SEQ ID NO: 456 - DNA, 16 bp, synthetic construct
  misc_feature 1..16: note = Description of Artificial Sequence: Syntheticoligonucleotide
  source 1..16: mol_type = other DNA
cagagggtttgtaagt

SEQ ID NO: 457 - DNA, 16 bp, synthetic construct
  misc_feature 1..16: note = Description of Artificial Sequence: Syntheticoligonucleotide
  source 1..16: mol_type = other DNA
tcgcatcatgagaaat

SEQ ID NO: 458 - DNA, 16 bp, synthetic construct
  misc_feature 1..16: note = Description of Artificial Sequence: Syntheticoligonucleotide
  source 1..16: mol_type = other DNA
gcttaaacttcccact

SEQ ID NO: 459 - DNA, 16 bp, synthetic construct
  misc_feature 1..16: note = Description of Artificial Sequence: Syntheticoligonucleotide
  source 1..16: mol_type = other DNA
catggagctcctttgc

SEQ ID NO: 460 - DNA, 16 bp, synthetic construct
  misc_feature 1..16: note = Description of Artificial Sequence: Syntheticoligonucleotide
  source 1..16: mol_type = other DNA
gaggcatggccccaat

SEQ ID NO: 461 - DNA, 16 bp, synthetic construct
  misc_feature 1..16: note = Description of Artificial Sequence: Syntheticoligonucleotide
  source 1..16: mol_type = other DNA
ggaaaggaggtgctcc

SEQ ID NO: 462 - DNA, 16 bp, synthetic construct
  misc_feature 1..16: note = Description of Artificial Sequence: Syntheticoligonucleotide
  source 1..16: mol_type = other DNA
ctgctaagcccacagg

SEQ ID NO: 463 - DNA, 16 bp, synthetic construct
  misc_feature 1..16: note = Description of Artificial Sequence: Syntheticoligonucleotide
  source 1..16: mol_type = other DNA
ttgaaaagaagcggag

SEQ ID NO: 464 - DNA, 16 bp, synthetic construct
  misc_feature 1..16: note = Description of Artificial Sequence: Syntheticoligonucleotide
  source 1..16: mol_type = other DNA
caccgtcaacacccgt

SEQ ID NO: 465 - DNA, 16 bp, synthetic construct
  misc_feature 1..16: note = Description of Artificial Sequence: Syntheticoligonucleotide
  source 1..16: mol_type = other DNA
atgcaggacctcctag

SEQ ID NO: 466 - DNA, 16 bp, synthetic construct
  misc_feature 1..16: note = Description of Artificial Sequence: Syntheticoligonucleotide
  source 1..16: mol_type = other DNA
gggaatggaggaaccc

SEQ ID NO: 467 - DNA, 16 bp, synthetic construct
  misc_feature 1..16: note = Description of Artificial Sequence: Syntheticoligonucleotide
  source 1..16: mol_type = other DNA
gtccaggagagggtta

SEQ ID NO: 468 - DNA, 16 bp, synthetic construct
  misc_feature 1..16: note = Description of Artificial Sequence: Syntheticoligonucleotide
  source 1..16: mol_type = other DNA
gatcaaatgggtgtta

SEQ ID NO: 469 - DNA, 16 bp, synthetic construct
  misc_feature 1..16: note = Description of Artificial Sequence: Syntheticoligonucleotide
  source 1..16: mol_type = other DNA
cagagtcagcgatgat

SEQ ID NO: 470 - DNA, 16 bp, synthetic construct
  misc_feature 1..16: note = Description of Artificial Sequence: Syntheticoligonucleotide
  source 1..16: mol_type = other DNA
tgaattatcgagtatc

SEQ ID NO: 471 - DNA, 16 bp, synthetic construct
  misc_feature 1..16: note = Description of Artificial Sequence: Syntheticoligonucleotide
  source 1..16: mol_type = other DNA
gtaagggatcaggact

SEQ ID NO: 472 - DNA, 16 bp, synthetic construct
  misc_feature 1..16: note = Description of Artificial Sequence: Syntheticoligonucleotide
  source 1..16: mol_type = other DNA
tttttcgatgagtgtg

SEQ ID NO: 473 - DNA, 16 bp, synthetic construct
  misc_feature 1..16: note = Description of Artificial Sequence: Syntheticoligonucleotide
  source 1..16: mol_type = other DNA
aaggatcagcctggct

SEQ ID NO: 474 - DNA, 16 bp, synthetic construct
  misc_feature 1..16: note = Description of Artificial Sequence: Syntheticoligonucleotide
  source 1..16: mol_type = other DNA
ccctggaaggttcccc

SEQ ID NO: 475 - DNA, 16 bp, synthetic construct
  misc_feature 1..16: note = Description of Artificial Sequence: Syntheticoligonucleotide
  source 1..16: mol_type = other DNA
ggagtgcctgtaagtg

SEQ ID NO: 476 - DNA, 16 bp, synthetic construct
  misc_feature 1..16: note = Description of Artificial Sequence: Syntheticoligonucleotide
  source 1..16: mol_type = other DNA
agaagaccccagtggc

SEQ ID NO: 477 - DNA, 16 bp, synthetic construct
  misc_feature 1..16: note = Description of Artificial Sequence: Syntheticoligonucleotide
  source 1..16: mol_type = other DNA
acaccatttgccagca

SEQ ID NO: 478 - DNA, 16 bp, synthetic construct
  misc_feature 1..16: note = Description of Artificial Sequence: Syntheticoligonucleotide
  source 1..16: mol_type = other DNA
ctggaggagacattgt

SEQ ID NO: 479 - DNA, 16 bp, synthetic construct
  misc_feature 1..16: note = Description of Artificial Sequence: Syntheticoligonucleotide
  source 1..16: mol_type = other DNA
aaacaggctgtcaggg

SEQ ID NO: 480 - DNA, 16 bp, synthetic construct
  misc_feature 1..16: note = Description of Artificial Sequence: Syntheticoligonucleotide
  source 1..16: mol_type = other DNA
gtcgcatgttgtggaa

SEQ ID NO: 481 - DNA, 16 bp, synthetic construct
  misc_feature 1..16: note = Description of Artificial Sequence: Syntheticoligonucleotide
  source 1..16: mol_type = other DNA
ctggctccgtttcttg

SEQ ID NO: 482 - DNA, 16 bp, synthetic construct
  misc_feature 1..16: note = Description of Artificial Sequence: Syntheticoligonucleotide
  source 1..16: mol_type = other DNA
gacagtggaaacctca

SEQ ID NO: 483 - DNA, 16 bp, synthetic construct
  misc_feature 1..16: note = Description of Artificial Sequence: Syntheticoligonucleotide
  source 1..16: mol_type = other DNA
gtgagggacaggattg

SEQ ID NO: 484 - DNA, 16 bp, synthetic construct
  misc_feature 1..16: note = Description of Artificial Sequence: Syntheticoligonucleotide
  source 1..16: mol_type = other DNA
gtgtaggcctctgggc

SEQ ID NO: 485 - DNA, 16 bp, synthetic construct
  misc_feature 1..16: note = Description of Artificial Sequence: Syntheticoligonucleotide
  source 1..16: mol_type = other DNA
tttttggcaaggcagt

SEQ ID NO: 486 - DNA, 16 bp, synthetic construct
  misc_feature 1..16: note = Description of Artificial Sequence: Syntheticoligonucleotide
  source 1..16: mol_type = other DNA
tccactgacctgtcct

SEQ ID NO: 487 - DNA, 16 bp, synthetic construct
  misc_feature 1..16: note = Description of Artificial Sequence: Syntheticoligonucleotide
  source 1..16: mol_type = other DNA
agctgcgatggcactt

SEQ ID NO: 488 - DNA, 16 bp, synthetic construct
  misc_feature 1..16: note = Description of Artificial Sequence: Syntheticoligonucleotide
  source 1..16: mol_type = other DNA
accttggtgaagtgga

SEQ ID NO: 489 - DNA, 16 bp, synthetic construct
  misc_feature 1..16: note = Description of Artificial Sequence: Syntheticoligonucleotide
  source 1..16: mol_type = other DNA
ccttacctggctggaa

SEQ ID NO: 490 - DNA, 16 bp, synthetic construct
  misc_feature 1..16: note = Description of Artificial Sequence: Syntheticoligonucleotide
  source 1..16: mol_type = other DNA
cagttgcacctggaca

SEQ ID NO: 491 - DNA, 16 bp, synthetic construct
  misc_feature 1..16: note = Description of Artificial Sequence: Syntheticoligonucleotide
  source 1..16: mol_type = other DNA
ggagatcgatggagtg

SEQ ID NO: 492 - DNA, 16 bp, synthetic construct
  misc_feature 1..16: note = Description of Artificial Sequence: Syntheticoligonucleotide
  source 1..16: mol_type = other DNA
gaactgatgctcactc

SEQ ID NO: 493 - DNA, 16 bp, synthetic construct
  misc_feature 1..16: note = Description of Artificial Sequence: Syntheticoligonucleotide
  source 1..16: mol_type = other DNA
tctaaagcgatacaag

SEQ ID NO: 494 - DNA, 16 bp, synthetic construct
  misc_feature 1..16: note = Description of Artificial Sequence: Syntheticoligonucleotide
  source 1..16: mol_type = other DNA
aatcgagctcacccca

SEQ ID NO: 495 - DNA, 16 bp, synthetic construct
  misc_feature 1..16: note = Description of Artificial Sequence: Syntheticoligonucleotide
  source 1..16: mol_type = other DNA
acaatcggcacttggt

SEQ ID NO: 496 - DNA, 16 bp, synthetic construct
  misc_feature 1..16: note = Description of Artificial Sequence: Syntheticoligonucleotide
  source 1..16: mol_type = other DNA
gagcataaaataggac

SEQ ID NO: 497 - DNA, 16 bp, synthetic construct
  misc_feature 1..16: note = Description of Artificial Sequence: Syntheticoligonucleotide
  source 1..16: mol_type = other DNA
accctattaggagtaa

SEQ ID NO: 498 - DNA, 16 bp, synthetic construct
  misc_feature 1..16: note = Description of Artificial Sequence: Syntheticoligonucleotide
  source 1..16: mol_type = other DNA
catcataagcatcaca

SEQ ID NO: 499 - DNA, 16 bp, synthetic construct
  misc_feature 1..16: note = Description of Artificial Sequence: Syntheticoligonucleotide
  source 1..16: mol_type = other DNA
cttaacctctatagta

SEQ ID NO: 500 - DNA, 16 bp, synthetic construct
  misc_feature 1..16: note = Description of Artificial Sequence: Syntheticoligonucleotide
  source 1..16: mol_type = other DNA
gatcttgggtttattg

SEQ ID NO: 501 - DNA, 16 bp, synthetic construct
  misc_feature 1..16: note = Description of Artificial Sequence: Syntheticoligonucleotide
  source 1..16: mol_type = other DNA
agtgaatagtcagtcc

SEQ ID NO: 502 - DNA, 16 bp, synthetic construct
  misc_feature 1..16: note = Description of Artificial Sequence: Syntheticoligonucleotide
  source 1..16: mol_type = other DNA
cctggtataagaacag

SEQ ID NO: 503 - DNA, 16 bp, synthetic construct
  misc_feature 1..16: note = Description of Artificial Sequence: Syntheticoligonucleotide
  source 1..16: mol_type = other DNA
ggacacatgcatggag

SEQ ID NO: 504 - DNA, 16 bp, synthetic construct
  misc_feature 1..16: note = Description of Artificial Sequence: Syntheticoligonucleotide
  source 1..16: mol_type = other DNA
agtcattaggtgtctg

SEQ ID NO: 505 - DNA, 16 bp, synthetic construct
  misc_feature 1..16: note = Description of Artificial Sequence: Syntheticoligonucleotide
  source 1..16: mol_type = other DNA
cctgagatctaggctt

SEQ ID NO: 506 - DNA, 16 bp, synthetic construct
  misc_feature 1..16: note = Description of Artificial Sequence: Syntheticoligonucleotide
  source 1..16: mol_type = other DNA
actgacatgcctccat

SEQ ID NO: 507 - DNA, 16 bp, synthetic construct
  misc_feature 1..16: note = Description of Artificial Sequence: Syntheticoligonucleotide
  source 1..16: mol_type = other DNA
gtccactctggaacaa

SEQ ID NO: 508 - DNA, 16 bp, synthetic construct
  misc_feature 1..16: note = Description of Artificial Sequence: Syntheticoligonucleotide
  source 1..16: mol_type = other DNA
gtataacaccaggacc

SEQ ID NO: 509 - DNA, 16 bp, synthetic construct
  misc_feature 1..16: note = Description of Artificial Sequence: Syntheticoligonucleotide
  source 1..16: mol_type = other DNA
cccctagctctgaaga

SEQ ID NO: 510 - DNA, 16 bp, synthetic construct
  misc_feature 1..16: note = Description of Artificial Sequence: Syntheticoligonucleotide
  source 1..16: mol_type = other DNA
cggccggatgcgccgg

SEQ ID NO: 511 - DNA, 16 bp, synthetic construct
  misc_feature 1..16: note = Description of Artificial Sequence: Syntheticoligonucleotide
  source 1..16: mol_type = other DNA
gccggcttcctgcact

SEQ ID NO: 512 - DNA, 16 bp, synthetic construct
  misc_feature 1..16: note = Description of Artificial Sequence: Syntheticoligonucleotide
  source 1..16: mol_type = other DNA
ggccagagctaagaat

SEQ ID NO: 513 - DNA, 16 bp, synthetic construct
  misc_feature 1..16: note = Description of Artificial Sequence: Syntheticoligonucleotide
  source 1..16: mol_type = other DNA
ctccgaacaagggcct

SEQ ID NO: 514 - DNA, 16 bp, synthetic construct
  misc_feature 1..16: note = Description of Artificial Sequence: Syntheticoligonucleotide
  source 1..16: mol_type = other DNA
ctgagttgggcacaca

SEQ ID NO: 515 - DNA, 16 bp, synthetic construct
  misc_feature 1..16: note = Description of Artificial Sequence: Syntheticoligonucleotide
  source 1..16: mol_type = other DNA
tcctggtctgagagga

SEQ ID NO: 516 - DNA, 16 bp, synthetic construct
  misc_feature 1..16: note = Description of Artificial Sequence: Syntheticoligonucleotide
  source 1..16: mol_type = other DNA
gcctcaaatgcccact

SEQ ID NO: 517 - DNA, 16 bp, synthetic construct
  misc_feature 1..16: note = Description of Artificial Sequence: Syntheticoligonucleotide
  source 1..16: mol_type = other DNA
gcaaggaggcgagtcc

SEQ ID NO: 518 - DNA, 16 bp, synthetic construct
  misc_feature 1..16: note = Description of Artificial Sequence: Syntheticoligonucleotide
  source 1..16: mol_type = other DNA
tggaaggaccgagctg

SEQ ID NO: 519 - DNA, 16 bp, synthetic construct
  misc_feature 1..16: note = Description of Artificial Sequence: Syntheticoligonucleotide
  source 1..16: mol_type = other DNA
gagaaggcgagaagtg

SEQ ID NO: 520 - DNA, 16 bp, synthetic construct
  misc_feature 1..16: note = Description of Artificial Sequence: Syntheticoligonucleotide
  source 1..16: mol_type = other DNA
gtctcggactttctcc

SEQ ID NO: 521 - DNA, 16 bp, synthetic construct
  misc_feature 1..16: note = Description of Artificial Sequence: Syntheticoligonucleotide
  source 1..16: mol_type = other DNA
ccacacatgccccacg

SEQ ID NO: 522 - DNA, 16 bp, synthetic construct
  misc_feature 1..16: note = Description of Artificial Sequence: Syntheticoligonucleotide
  source 1..16: mol_type = other DNA
gtcggcacctgtaggt

SEQ ID NO: 523 - DNA, 16 bp, synthetic construct
  misc_feature 1..16: note = Description of Artificial Sequence: Syntheticoligonucleotide
  source 1..16: mol_type = other DNA
gactacaatacggcct

SEQ ID NO: 524 - DNA, 16 bp, synthetic construct
  misc_feature 1..16: note = Description of Artificial Sequence: Syntheticoligonucleotide
  source 1..16: mol_type = other DNA
ctctgcactgcaagcc

SEQ ID NO: 525 - DNA, 16 bp, synthetic construct
  misc_feature 1..16: note = Description of Artificial Sequence: Syntheticoligonucleotide
  source 1..16: mol_type = other DNA
agcctacactgctcac

SEQ ID NO: 526 - DNA, 16 bp, synthetic construct
  misc_feature 1..16: note = Description of Artificial Sequence: Syntheticoligonucleotide
  source 1..16: mol_type = other DNA
tgtaaagctctgtggt

SEQ ID NO: 527 - DNA, 16 bp, synthetic construct
  misc_feature 1..16: note = Description of Artificial Sequence: Syntheticoligonucleotide
  source 1..16: mol_type = other DNA
gaagcttaaagacggc

SEQ ID NO: 528 - DNA, 16 bp, synthetic construct
  misc_feature 1..16: note = Description of Artificial Sequence: Syntheticoligonucleotide
  source 1..16: mol_type = other DNA
tactacttattgggat

SEQ ID NO: 529 - DNA, 16 bp, synthetic construct
  misc_feature 1..16: note = Description of Artificial Sequence: Syntheticoligonucleotide
  source 1..16: mol_type = other DNA
aggagtagcagggcaa

SEQ ID NO: 530 - DNA, 16 bp, synthetic construct
  misc_feature 1..16: note = Description of Artificial Sequence: Syntheticoligonucleotide
  source 1..16: mol_type = other DNA
tgctaagggttgtgtg

SEQ ID NO: 531 - DNA, 16 bp, synthetic construct
  misc_feature 1..16: note = Description of Artificial Sequence: Syntheticoligonucleotide
  source 1..16: mol_type = other DNA
tccgcctggcagtgcc

SEQ ID NO: 532 - DNA, 16 bp, synthetic construct
  misc_feature 1..16: note = Description of Artificial Sequence: Syntheticoligonucleotide
  source 1..16: mol_type = other DNA
acatgaggcctcagcc

SEQ ID NO: 533 - DNA, 16 bp, synthetic construct
  misc_feature 1..16: note = Description of Artificial Sequence: Syntheticoligonucleotide
  source 1..16: mol_type = other DNA
gtcagagggtttgtaa

SEQ ID NO: 534 - DNA, 16 bp, synthetic construct
  misc_feature 1..16: note = Description of Artificial Sequence: Syntheticoligonucleotide
  source 1..16: mol_type = other DNA
attcgcatcatgagaa

SEQ ID NO: 535 - DNA, 16 bp, synthetic construct
  misc_feature 1..16: note = Description of Artificial Sequence: Syntheticoligonucleotide
  source 1..16: mol_type = other DNA
aggcttaaacttccca

SEQ ID NO: 536 - DNA, 16 bp, synthetic construct
  misc_feature 1..16: note = Description of Artificial Sequence: Syntheticoligonucleotide
  source 1..16: mol_type = other DNA
cagcatggagctcctt

SEQ ID NO: 537 - DNA, 16 bp, synthetic construct
  misc_feature 1..16: note = Description of Artificial Sequence: Syntheticoligonucleotide
  source 1..16: mol_type = other DNA
ggtgaggcatggcccc

SEQ ID NO: 538 - DNA, 16 bp, synthetic construct
  misc_feature 1..16: note = Description of Artificial Sequence: Syntheticoligonucleotide
  source 1..16: mol_type = other DNA
gattttccttggtcag

SEQ ID NO: 539 - DNA, 16 bp, synthetic construct
  misc_feature 1..16: note = Description of Artificial Sequence: Syntheticoligonucleotide
  source 1..16: mol_type = other DNA
ctctgatccctgctaa

SEQ ID NO: 540 - DNA, 16 bp, synthetic construct
  misc_feature 1..16: note = Description of Artificial Sequence: Syntheticoligonucleotide
  source 1..16: mol_type = other DNA
ccgaggttgaaaagaa

SEQ ID NO: 541 - DNA, 16 bp, synthetic construct
  misc_feature 1..16: note = Description of Artificial Sequence: Syntheticoligonucleotide
  source 1..16: mol_type = other DNA
agatctcaccgtcaac

SEQ ID NO: 542 - DNA, 16 bp, synthetic construct
  misc_feature 1..16: note = Description of Artificial Sequence: Syntheticoligonucleotide
  source 1..16: mol_type = other DNA
ccccatgcaggacctc

SEQ ID NO: 543 - DNA, 16 bp, synthetic construct
  misc_feature 1..16: note = Description of Artificial Sequence: Syntheticoligonucleotide
  source 1..16: mol_type = other DNA
ttgggaatggaggaac

SEQ ID NO: 544 - DNA, 16 bp, synthetic construct
  misc_feature 1..16: note = Description of Artificial Sequence: Syntheticoligonucleotide
  source 1..16: mol_type = other DNA
ctattttatgggtcca

SEQ ID NO: 545 - DNA, 16 bp, synthetic construct
  misc_feature 1..16: note = Description of Artificial Sequence: Syntheticoligonucleotide
  source 1..16: mol_type = other DNA
ttaaggatcaaatggg

SEQ ID NO: 546 - DNA, 16 bp, synthetic construct
  misc_feature 1..16: note = Description of Artificial Sequence: Syntheticoligonucleotide
  source 1..16: mol_type = other DNA
tacagagtcagcgatg

SEQ ID NO: 547 - DNA, 16 bp, synthetic construct
  misc_feature 1..16: note = Description of Artificial Sequence: Syntheticoligonucleotide
  source 1..16: mol_type = other DNA
tttgaattatcgagta

SEQ ID NO: 548 - DNA, 16 bp, synthetic construct
  misc_feature 1..16: note = Description of Artificial Sequence: Syntheticoligonucleotide
  source 1..16: mol_type = other DNA
aggtaagggatcagga

SEQ ID NO: 549 - DNA, 16 bp, synthetic construct
  misc_feature 1..16: note = Description of Artificial Sequence: Syntheticoligonucleotide
  source 1..16: mol_type = other DNA
ttttttcgatgagtgt

SEQ ID NO: 550 - DNA, 16 bp, synthetic construct
  misc_feature 1..16: note = Description of Artificial Sequence: Syntheticoligonucleotide
  source 1..16: mol_type = other DNA
agtggactgacagaaa

SEQ ID NO: 551 - DNA, 16 bp, synthetic construct
  misc_feature 1..16: note = Description of Artificial Sequence: Syntheticoligonucleotide
  source 1..16: mol_type = other DNA
gccctggaaggttccc

SEQ ID NO: 552 - DNA, 16 bp, synthetic construct
  misc_feature 1..16: note = Description of Artificial Sequence: Syntheticoligonucleotide
  source 1..16: mol_type = other DNA
gaggagtgcctgtaag

SEQ ID NO: 553 - DNA, 16 bp, synthetic construct
  misc_feature 1..16: note = Description of Artificial Sequence: Syntheticoligonucleotide
  source 1..16: mol_type = other DNA
gggagaagaccccagt

SEQ ID NO: 554 - DNA, 16 bp, synthetic construct
  misc_feature 1..16: note = Description of Artificial Sequence: Syntheticoligonucleotide
  source 1..16: mol_type = other DNA
tgcagacaccatttgc

SEQ ID NO: 555 - DNA, 16 bp, synthetic construct
  misc_feature 1..16: note = Description of Artificial Sequence: Syntheticoligonucleotide
  source 1..16: mol_type = other DNA
gactgtaccatctctc

SEQ ID NO: 556 - DNA, 16 bp, synthetic construct
  misc_feature 1..16: note = Description of Artificial Sequence: Syntheticoligonucleotide
  source 1..16: mol_type = other DNA
ggacagcaaacaggct

SEQ ID NO: 557 - DNA, 16 bp, synthetic construct
  misc_feature 1..16: note = Description of Artificial Sequence: Syntheticoligonucleotide
  source 1..16: mol_type = other DNA
ggtcgcatgttgtgga

SEQ ID NO: 558 - DNA, 16 bp, synthetic construct
  misc_feature 1..16: note = Description of Artificial Sequence: Syntheticoligonucleotide
  source 1..16: mol_type = other DNA
cctctggctccgtttc

SEQ ID NO: 559 - DNA, 16 bp, synthetic construct
  misc_feature 1..16: note = Description of Artificial Sequence: Syntheticoligonucleotide
  source 1..16: mol_type = other DNA
agacagtggaaacctc

SEQ ID NO: 560 - DNA, 16 bp, synthetic construct
  misc_feature 1..16: note = Description of Artificial Sequence: Syntheticoligonucleotide
  source 1..16: mol_type = other DNA
gagtgagggacaggat

SEQ ID NO: 561 - DNA, 16 bp, synthetic construct
  misc_feature 1..16: note = Description of Artificial Sequence: Syntheticoligonucleotide
  source 1..16: mol_type = other DNA
tgtgtaggcctctggg

SEQ ID NO: 562 - DNA, 16 bp, synthetic construct
  misc_feature 1..16: note = Description of Artificial Sequence: Syntheticoligonucleotide
  source 1..16: mol_type = other DNA
gtatttttggcaaggc

SEQ ID NO: 563 - DNA, 16 bp, synthetic construct
  misc_feature 1..16: note = Description of Artificial Sequence: Syntheticoligonucleotide
  source 1..16: mol_type = other DNA
ctgtccactgacctgt

SEQ ID NO: 564 - DNA, 16 bp, synthetic construct
  misc_feature 1..16: note = Description of Artificial Sequence: Syntheticoligonucleotide
  source 1..16: mol_type = other DNA
actttgagctgcgatg

SEQ ID NO: 565 - DNA, 16 bp, synthetic construct
  misc_feature 1..16: note = Description of Artificial Sequence: Syntheticoligonucleotide
  source 1..16: mol_type = other DNA
caccttggtgaagtgg

SEQ ID NO: 566 - DNA, 16 bp, synthetic construct
  misc_feature 1..16: note = Description of Artificial Sequence: Syntheticoligonucleotide
  source 1..16: mol_type = other DNA
accttacctggctgga

SEQ ID NO: 567 - DNA, 16 bp, synthetic construct
  misc_feature 1..16: note = Description of Artificial Sequence: Syntheticoligonucleotide
  source 1..16: mol_type = other DNA
tcagttgcacctggac

SEQ ID NO: 568 - DNA, 16 bp, synthetic construct
  misc_feature 1..16: note = Description of Artificial Sequence: Syntheticoligonucleotide
  source 1..16: mol_type = other DNA
aggagatcgatggagt

SEQ ID NO: 569 - DNA, 16 bp, synthetic construct
  misc_feature 1..16: note = Description of Artificial Sequence: Syntheticoligonucleotide
  source 1..16: mol_type = other DNA
agaactgatgctcact

SEQ ID NO: 570 - DNA, 16 bp, synthetic construct
  misc_feature 1..16: note = Description of Artificial Sequence: Syntheticoligonucleotide
  source 1..16: mol_type = other DNA
ctctaaagcgatacaa

SEQ ID NO: 571 - DNA, 16 bp, synthetic construct
  misc_feature 1..16: note = Description of Artificial Sequence: Syntheticoligonucleotide
  source 1..16: mol_type = other DNA
gaatcgagctcacccc

SEQ ID NO: 572 - DNA, 16 bp, synthetic construct
  misc_feature 1..16: note = Description of Artificial Sequence: Syntheticoligonucleotide
  source 1..16: mol_type = other DNA
aacaatcggcacttgg

SEQ ID NO: 573 - DNA, 16 bp, synthetic construct
  misc_feature 1..16: note = Description of Artificial Sequence: Syntheticoligonucleotide
  source 1..16: mol_type = other DNA
ggagcataaaatagga

SEQ ID NO: 574 - DNA, 16 bp, synthetic construct
  misc_feature 1..16: note = Description of Artificial Sequence: Syntheticoligonucleotide
  source 1..16: mol_type = other DNA
caccctattaggagta

SEQ ID NO: 575 - DNA, 16 bp, synthetic construct
  misc_feature 1..16: note = Description of Artificial Sequence: Syntheticoligonucleotide
  source 1..16: mol_type = other DNA
ccatcataagcatcac

SEQ ID NO: 576 - DNA, 16 bp, synthetic construct
  misc_feature 1..16: note = Description of Artificial Sequence: Syntheticoligonucleotide
  source 1..16: mol_type = other DNA
tcttaacctctatagt

SEQ ID NO: 577 - DNA, 16 bp, synthetic construct
  misc_feature 1..16: note = Description of Artificial Sequence: Syntheticoligonucleotide
  source 1..16: mol_type = other DNA
ctgatcttgggtttat

SEQ ID NO: 578 - DNA, 16 bp, synthetic construct
  misc_feature 1..16: note = Description of Artificial Sequence: Syntheticoligonucleotide
  source 1..16: mol_type = other DNA
gagtgaatagtcagtc

SEQ ID NO: 579 - DNA, 16 bp, synthetic construct
  misc_feature 1..16: note = Description of Artificial Sequence: Syntheticoligonucleotide
  source 1..16: mol_type = other DNA
gcaaaacagtgtggcc

SEQ ID NO: 580 - DNA, 16 bp, synthetic construct
  misc_feature 1..16: note = Description of Artificial Sequence: Syntheticoligonucleotide
  source 1..16: mol_type = other DNA
gatagtgagagacatt

SEQ ID NO: 581 - DNA, 16 bp, synthetic construct
  misc_feature 1..16: note = Description of Artificial Sequence: Syntheticoligonucleotide
  source 1..16: mol_type = other DNA
aagtcattaggtgtct

SEQ ID NO: 582 - DNA, 16 bp, synthetic construct
  misc_feature 1..16: note = Description of Artificial Sequence: Syntheticoligonucleotide
  source 1..16: mol_type = other DNA
tcctgagatctaggct

SEQ ID NO: 583 - DNA, 16 bp, synthetic construct
  misc_feature 1..16: note = Description of Artificial Sequence: Syntheticoligonucleotide
  source 1..16: mol_type = other DNA
cctgactgactgacat

SEQ ID NO: 584 - DNA, 16 bp, synthetic construct
  misc_feature 1..16: note = Description of Artificial Sequence: Syntheticoligonucleotide
  source 1..16: mol_type = other DNA
ctgtccactctggaac

SEQ ID NO: 585 - DNA, 16 bp, synthetic construct
  misc_feature 1..16: note = Description of Artificial Sequence: Syntheticoligonucleotide
  source 1..16: mol_type = other DNA
agtataacaccaggac

SEQ ID NO: 586 - DNA, 16 bp, synthetic construct
  misc_feature 1..16: note = Description of Artificial Sequence: Syntheticoligonucleotide
  source 1..16: mol_type = other DNA
tgacaagcccctagct

SEQ ID NO: 587 - DNA, 16 bp, synthetic construct
  misc_feature 1..16: note = Description of Artificial Sequence: Syntheticoligonucleotide
  source 1..16: mol_type = other DNA
atggcggccggatgcg

SEQ ID NO: 588 - DNA, 16 bp, synthetic construct
  misc_feature 1..16: note = Description of Artificial Sequence: Syntheticoligonucleotide
  source 1..16: mol_type = other DNA
cagccggcttcctgca

SEQ ID NO: 589 - DNA, 16 bp, synthetic construct
  misc_feature 1..16: note = Description of Artificial Sequence: Syntheticoligonucleotide
  source 1..16: mol_type = other DNA
cacttggccagagcta

SEQ ID NO: 590 - DNA, 16 bp, synthetic construct
  misc_feature 1..16: note = Description of Artificial Sequence: Syntheticoligonucleotide
  source 1..16: mol_type = other DNA
gctccgaacaagggcc

SEQ ID NO: 591 - DNA, 16 bp, synthetic construct
  misc_feature 1..16: note = Description of Artificial Sequence: Syntheticoligonucleotide
  source 1..16: mol_type = other DNA
actgagttgggcacac

SEQ ID NO: 592 - DNA, 16 bp, synthetic construct
  misc_feature 1..16: note = Description of Artificial Sequence: Syntheticoligonucleotide
  source 1..16: mol_type = other DNA
atcctggtctgagagg

SEQ ID NO: 593 - DNA, 16 bp, synthetic construct
  misc_feature 1..16: note = Description of Artificial Sequence: Syntheticoligonucleotide
  source 1..16: mol_type = other DNA
ccaatttctggccctc

SEQ ID NO: 594 - DNA, 16 bp, synthetic construct
  misc_feature 1..16: note = Description of Artificial Sequence: Syntheticoligonucleotide
  source 1..16: mol_type = other DNA
ggcaaggaggcgagtc

SEQ ID NO: 595 - DNA, 16 bp, synthetic construct
  misc_feature 1..16: note = Description of Artificial Sequence: Syntheticoligonucleotide
  source 1..16: mol_type = other DNA
ctggaaggaccgagct

SEQ ID NO: 596 - DNA, 16 bp, synthetic construct
  misc_feature 1..16: note = Description of Artificial Sequence: Syntheticoligonucleotide
  source 1..16: mol_type = other DNA
ggagaaggcgagaagt

SEQ ID NO: 597 - DNA, 16 bp, synthetic construct
  misc_feature 1..16: note = Description of Artificial Sequence: Syntheticoligonucleotide
  source 1..16: mol_type = other DNA
gccggagctggtctcg

SEQ ID NO: 598 - DNA, 16 bp, synthetic construct
  misc_feature 1..16: note = Description of Artificial Sequence: Syntheticoligonucleotide
  source 1..16: mol_type = other DNA
ccatagttgcacccca

SEQ ID NO: 599 - DNA, 16 bp, synthetic construct
  misc_feature 1..16: note = Description of Artificial Sequence: Syntheticoligonucleotide
  source 1..16: mol_type = other DNA
aggtcggcacctgtag

SEQ ID NO: 600 - DNA, 16 bp, synthetic construct
  misc_feature 1..16: note = Description of Artificial Sequence: Syntheticoligonucleotide
  source 1..16: mol_type = other DNA
ggactacaatacggcc

SEQ ID NO: 601 - DNA, 16 bp, synthetic construct
  misc_feature 1..16: note = Description of Artificial Sequence: Syntheticoligonucleotide
  source 1..16: mol_type = other DNA
aaatactctgcactgc

SEQ ID NO: 602 - DNA, 16 bp, synthetic construct
  misc_feature 1..16: note = Description of Artificial Sequence: Syntheticoligonucleotide
  source 1..16: mol_type = other DNA
tagcctacactgctca

SEQ ID NO: 603 - DNA, 16 bp, synthetic construct
  misc_feature 1..16: note = Description of Artificial Sequence: Syntheticoligonucleotide
  source 1..16: mol_type = other DNA
agctttgtaaagctct

SEQ ID NO: 604 - DNA, 16 bp, synthetic construct
  misc_feature 1..16: note = Description of Artificial Sequence: Syntheticoligonucleotide
  source 1..16: mol_type = other DNA
agaagcttaaagacgg

SEQ ID NO: 605 - DNA, 16 bp, synthetic construct
  misc_feature 1..16: note = Description of Artificial Sequence: Syntheticoligonucleotide
  source 1..16: mol_type = other DNA
ttactacttattggga

SEQ ID NO: 606 - DNA, 16 bp, synthetic construct
  misc_feature 1..16: note = Description of Artificial Sequence: Syntheticoligonucleotide
  source 1..16: mol_type = other DNA
tgaggagtagcagggc

SEQ ID NO: 607 - DNA, 16 bp, synthetic construct
  misc_feature 1..16: note = Description of Artificial Sequence: Syntheticoligonucleotide
  source 1..16: mol_type = other DNA
ctgctaagggttgtgt

SEQ ID NO: 608 - DNA, 16 bp, synthetic construct
  misc_feature 1..16: note = Description of Artificial Sequence: Syntheticoligonucleotide
  source 1..16: mol_type = other DNA
attacctgctgctcca

SEQ ID NO: 609 - DNA, 16 bp, synthetic construct
  misc_feature 1..16: note = Description of Artificial Sequence: Syntheticoligonucleotide
  source 1..16: mol_type = other DNA
aacatgaggcctcagc

SEQ ID NO: 610 - DNA, 16 bp, synthetic construct
  misc_feature 1..16: note = Description of Artificial Sequence: Syntheticoligonucleotide
  source 1..16: mol_type = other DNA
tcttagagtcagaggg

SEQ ID NO: 611 - DNA, 16 bp, synthetic construct
  misc_feature 1..16: note = Description of Artificial Sequence: Syntheticoligonucleotide
  source 1..16: mol_type = other DNA
acattcgcatcatgag

SEQ ID NO: 612 - DNA, 16 bp, synthetic construct
  misc_feature 1..16: note = Description of Artificial Sequence: Syntheticoligonucleotide
  source 1..16: mol_type = other DNA
gaggcttaaacttccc

SEQ ID NO: 613 - DNA, 16 bp, synthetic construct
  misc_feature 1..16: note = Description of Artificial Sequence: Syntheticoligonucleotide
  source 1..16: mol_type = other DNA
gggcagcatggagctc

SEQ ID NO: 614 - DNA, 16 bp, synthetic construct
  misc_feature 1..16: note = Description of Artificial Sequence: Syntheticoligonucleotide
  source 1..16: mol_type = other DNA
agagtgggtgaggcat

SEQ ID NO: 615 - DNA, 16 bp, synthetic construct
  misc_feature 1..16: note = Description of Artificial Sequence: Syntheticoligonucleotide
  source 1..16: mol_type = other DNA
cgattttccttggtca

SEQ ID NO: 616 - DNA, 16 bp, synthetic construct
  misc_feature 1..16: note = Description of Artificial Sequence: Syntheticoligonucleotide
  source 1..16: mol_type = other DNA
tctctgatccctgcta

SEQ ID NO: 617 - DNA, 16 bp, synthetic construct
  misc_feature 1..16: note = Description of Artificial Sequence: Syntheticoligonucleotide
  source 1..16: mol_type = other DNA
cccgaggttgaaaaga

SEQ ID NO: 618 - DNA, 16 bp, synthetic construct
  misc_feature 1..16: note = Description of Artificial Sequence: Syntheticoligonucleotide
  source 1..16: mol_type = other DNA
gagatctcaccgtcaa

SEQ ID NO: 619 - DNA, 16 bp, synthetic construct
  misc_feature 1..16: note = Description of Artificial Sequence: Syntheticoligonucleotide
  source 1..16: mol_type = other DNA
aagccccatgcaggac

SEQ ID NO: 620 - DNA, 16 bp, synthetic construct
  misc_feature 1..16: note = Description of Artificial Sequence: Syntheticoligonucleotide
  source 1..16: mol_type = other DNA
catttgaggcacggct

SEQ ID NO: 621 - DNA, 16 bp, synthetic construct
  misc_feature 1..16: note = Description of Artificial Sequence: Syntheticoligonucleotide
  source 1..16: mol_type = other DNA
aggctattttatgggt

SEQ ID NO: 622 - DNA, 16 bp, synthetic construct
  misc_feature 1..16: note = Description of Artificial Sequence: Syntheticoligonucleotide
  source 1..16: mol_type = other DNA
gttaaggatcaaatgg

SEQ ID NO: 623 - DNA, 16 bp, synthetic construct
  misc_feature 1..16: note = Description of Artificial Sequence: Syntheticoligonucleotide
  source 1..16: mol_type = other DNA
ttacagagtcagcgat

SEQ ID NO: 624 - DNA, 16 bp, synthetic construct
  misc_feature 1..16: note = Description of Artificial Sequence: Syntheticoligonucleotide
  source 1..16: mol_type = other DNA
cagagatggtttgaat

SEQ ID NO: 625 - DNA, 16 bp, synthetic construct
  misc_feature 1..16: note = Description of Artificial Sequence: Syntheticoligonucleotide
  source 1..16: mol_type = other DNA
taggtaagggatcagg

SEQ ID NO: 626 - DNA, 16 bp, synthetic construct
  misc_feature 1..16: note = Description of Artificial Sequence: Syntheticoligonucleotide
  source 1..16: mol_type = other DNA
ggcgaggctcctgaga

SEQ ID NO: 627 - DNA, 16 bp, synthetic construct
  misc_feature 1..16: note = Description of Artificial Sequence: Syntheticoligonucleotide
  source 1..16: mol_type = other DNA
tttttttcgatgagtg

SEQ ID NO: 628 - DNA, 16 bp, synthetic construct
  misc_feature 1..16: note = Description of Artificial Sequence: Syntheticoligonucleotide
  source 1..16: mol_type = other DNA
gaagtggactgacaga

SEQ ID NO: 629 - DNA, 16 bp, synthetic construct
  misc_feature 1..16: note = Description of Artificial Sequence: Syntheticoligonucleotide
  source 1..16: mol_type = other DNA
cggccctggaaggttc

SEQ ID NO: 630 - DNA, 16 bp, synthetic construct
  misc_feature 1..16: note = Description of Artificial Sequence: Syntheticoligonucleotide
  source 1..16: mol_type = other DNA
ggaggagtgcctgtaa

SEQ ID NO: 631 - DNA, 16 bp, synthetic construct
  misc_feature 1..16: note = Description of Artificial Sequence: Syntheticoligonucleotide
  source 1..16: mol_type = other DNA
aggccgggccttgagg

SEQ ID NO: 632 - DNA, 16 bp, synthetic construct
  misc_feature 1..16: note = Description of Artificial Sequence: Syntheticoligonucleotide
  source 1..16: mol_type = other DNA
accttctcacatccgg

SEQ ID NO: 633 - DNA, 16 bp, synthetic construct
  misc_feature 1..16: note = Description of Artificial Sequence: Syntheticoligonucleotide
  source 1..16: mol_type = other DNA
agactgtaccatctct

SEQ ID NO: 634 - DNA, 16 bp, synthetic construct
  misc_feature 1..16: note = Description of Artificial Sequence: Syntheticoligonucleotide
  source 1..16: mol_type = other DNA
ccggacagcaaacagg

SEQ ID NO: 635 - DNA, 16 bp, synthetic construct
  misc_feature 1..16: note = Description of Artificial Sequence: Syntheticoligonucleotide
  source 1..16: mol_type = other DNA
tccgctgcttctctgg

SEQ ID NO: 636 - DNA, 16 bp, synthetic construct
  misc_feature 1..16: note = Description of Artificial Sequence: Syntheticoligonucleotide
  source 1..16: mol_type = other DNA
tggaacacctgctggg

SEQ ID NO: 637 - DNA, 16 bp, synthetic construct
  misc_feature 1..16: note = Description of Artificial Sequence: Syntheticoligonucleotide
  source 1..16: mol_type = other DNA
gcaagacagtggaaac

SEQ ID NO: 638 - DNA, 16 bp, synthetic construct
  misc_feature 1..16: note = Description of Artificial Sequence: Syntheticoligonucleotide
  source 1..16: mol_type = other DNA
ggcaggctctctgtgt

SEQ ID NO: 639 - DNA, 16 bp, synthetic construct
  misc_feature 1..16: note = Description of Artificial Sequence: Syntheticoligonucleotide
  source 1..16: mol_type = other DNA
ctgtgtaggcctctgg

SEQ ID NO: 640 - DNA, 16 bp, synthetic construct
  misc_feature 1..16: note = Description of Artificial Sequence: Syntheticoligonucleotide
  source 1..16: mol_type = other DNA
gagtgaggtgagtggc

SEQ ID NO: 641 - DNA, 16 bp, synthetic construct
  misc_feature 1..16: note = Description of Artificial Sequence: Syntheticoligonucleotide
  source 1..16: mol_type = other DNA
gaggatccttcccagc

SEQ ID NO: 642 - DNA, 16 bp, synthetic construct
  misc_feature 1..16: note = Description of Artificial Sequence: Syntheticoligonucleotide
  source 1..16: mol_type = other DNA
cactttgagctgcgat

SEQ ID NO: 643 - DNA, 16 bp, synthetic construct
  misc_feature 1..16: note = Description of Artificial Sequence: Syntheticoligonucleotide
  source 1..16: mol_type = other DNA
tcaccttggtgaagtg

SEQ ID NO: 644 - DNA, 16 bp, synthetic construct
  misc_feature 1..16: note = Description of Artificial Sequence: Syntheticoligonucleotide
  source 1..16: mol_type = other DNA
gaccttacctggctgg

SEQ ID NO: 645 - DNA, 16 bp, synthetic construct
  misc_feature 1..16: note = Description of Artificial Sequence: Syntheticoligonucleotide
  source 1..16: mol_type = other DNA
attttcagttgcacct

SEQ ID NO: 646 - DNA, 16 bp, synthetic construct
  misc_feature 1..16: note = Description of Artificial Sequence: Syntheticoligonucleotide
  source 1..16: mol_type = other DNA
aaggagatcgatggag

SEQ ID NO: 647 - DNA, 16 bp, synthetic construct
  misc_feature 1..16: note = Description of Artificial Sequence: Syntheticoligonucleotide
  source 1..16: mol_type = other DNA
cagaactgatgctcac

SEQ ID NO: 648 - DNA, 16 bp, synthetic construct
  misc_feature 1..16: note = Description of Artificial Sequence: Syntheticoligonucleotide
  source 1..16: mol_type = other DNA
cctctaaagcgataca

SEQ ID NO: 649 - DNA, 16 bp, synthetic construct
  misc_feature 1..16: note = Description of Artificial Sequence: Syntheticoligonucleotide
  source 1..16: mol_type = other DNA
agaatcgagctcaccc

SEQ ID NO: 650 - DNA, 16 bp, synthetic construct
  misc_feature 1..16: note = Description of Artificial Sequence: Syntheticoligonucleotide
  source 1..16: mol_type = other DNA
caacaatcggcacttg

SEQ ID NO: 651 - DNA, 16 bp, synthetic construct
  misc_feature 1..16: note = Description of Artificial Sequence: Syntheticoligonucleotide
  source 1..16: mol_type = other DNA
agggagcataaaatag

SEQ ID NO: 652 - DNA, 16 bp, synthetic construct
  misc_feature 1..16: note = Description of Artificial Sequence: Syntheticoligonucleotide
  source 1..16: mol_type = other DNA
acaccctattaggagt

SEQ ID NO: 653 - DNA, 16 bp, synthetic construct
  misc_feature 1..16: note = Description of Artificial Sequence: Syntheticoligonucleotide
  source 1..16: mol_type = other DNA
aaccatcataagcatc

SEQ ID NO: 654 - DNA, 16 bp, synthetic construct
  misc_feature 1..16: note = Description of Artificial Sequence: Syntheticoligonucleotide
  source 1..16: mol_type = other DNA
ctcttaacctctatag

SEQ ID NO: 655 - DNA, 16 bp, synthetic construct
  misc_feature 1..16: note = Description of Artificial Sequence: Syntheticoligonucleotide
  source 1..16: mol_type = other DNA
gctgatcttgggttta

SEQ ID NO: 656 - DNA, 16 bp, synthetic construct
  misc_feature 1..16: note = Description of Artificial Sequence: Syntheticoligonucleotide
  source 1..16: mol_type = other DNA
tgagtgaatagtcagt

SEQ ID NO: 657 - DNA, 16 bp, synthetic construct
  misc_feature 1..16: note = Description of Artificial Sequence: Syntheticoligonucleotide
  source 1..16: mol_type = other DNA
gtattgcaaagcaaca

SEQ ID NO: 658 - DNA, 16 bp, synthetic construct
  misc_feature 1..16: note = Description of Artificial Sequence: Syntheticoligonucleotide
  source 1..16: mol_type = other DNA
gaacaagagatagtga

SEQ ID NO: 659 - DNA, 16 bp, synthetic construct
  misc_feature 1..16: note = Description of Artificial Sequence: Syntheticoligonucleotide
  source 1..16: mol_type = other DNA
ttaagtcattaggtgt

SEQ ID NO: 660 - DNA, 16 bp, synthetic construct
  misc_feature 1..16: note = Description of Artificial Sequence: Syntheticoligonucleotide
  source 1..16: mol_type = other DNA
agtcctgagatctagg

SEQ ID NO: 661 - DNA, 16 bp, synthetic construct
  misc_feature 1..16: note = Description of Artificial Sequence: Syntheticoligonucleotide
  source 1..16: mol_type = other DNA
agcctgactgactgac

SEQ ID NO: 662 - DNA, 16 bp, synthetic construct
  misc_feature 1..16: note = Description of Artificial Sequence: Syntheticoligonucleotide
  source 1..16: mol_type = other DNA
ccctagggcctcagtc

SEQ ID NO: 663 - DNA, 16 bp, synthetic construct
  misc_feature 1..16: note = Description of Artificial Sequence: Syntheticoligonucleotide
  source 1..16: mol_type = other DNA
tagtataacaccagga

SEQ ID NO: 664 - DNA, 16 bp, synthetic construct
  misc_feature 1..16: note = Description of Artificial Sequence: Syntheticoligonucleotide
  source 1..16: mol_type = other DNA
tatgacaagcccctag

SEQ ID NO: 665 - DNA, 16 bp, synthetic construct
  misc_feature 1..16: note = Description of Artificial Sequence: Syntheticoligonucleotide
  source 1..16: mol_type = other DNA
gtcatggcggccggat

SEQ ID NO: 666 - DNA, 16 bp, synthetic construct
  misc_feature 1..16: note = Description of Artificial Sequence: Syntheticoligonucleotide
  source 1..16: mol_type = other DNA
gggcagccggcttcct

SEQ ID NO: 667 - DNA, 16 bp, synthetic construct
  misc_feature 1..16: note = Description of Artificial Sequence: Syntheticoligonucleotide
  source 1..16: mol_type = other DNA
acacttggccagagct

SEQ ID NO: 668 - DNA, 16 bp, synthetic construct
  misc_feature 1..16: note = Description of Artificial Sequence: Syntheticoligonucleotide
  source 1..16: mol_type = other DNA
acaggagtgtgggtct

SEQ ID NO: 669 - DNA, 16 bp, synthetic construct
  misc_feature 1..16: note = Description of Artificial Sequence: Syntheticoligonucleotide
  source 1..16: mol_type = other DNA
cagcactgagttgggc

SEQ ID NO: 670 - DNA, 16 bp, synthetic construct
  misc_feature 1..16: note = Description of Artificial Sequence: Syntheticoligonucleotide
  source 1..16: mol_type = other DNA
taatcctggtctgaga

SEQ ID NO: 671 - DNA, 16 bp, synthetic construct
  misc_feature 1..16: note = Description of Artificial Sequence: Syntheticoligonucleotide
  source 1..16: mol_type = other DNA
cccaatttctggccct

SEQ ID NO: 672 - DNA, 16 bp, synthetic construct
  misc_feature 1..16: note = Description of Artificial Sequence: Syntheticoligonucleotide
  source 1..16: mol_type = other DNA
gggcaaggaggcgagt

SEQ ID NO: 673 - DNA, 16 bp, synthetic construct
  misc_feature 1..16: note = Description of Artificial Sequence: Syntheticoligonucleotide
  source 1..16: mol_type = other DNA
gctggaaggaccgagc

SEQ ID NO: 674 - DNA, 16 bp, synthetic construct
  misc_feature 1..16: note = Description of Artificial Sequence: Syntheticoligonucleotide
  source 1..16: mol_type = other DNA
gaatgggctggtggca

SEQ ID NO: 675 - DNA, 16 bp, synthetic construct
  misc_feature 1..16: note = Description of Artificial Sequence: Syntheticoligonucleotide
  source 1..16: mol_type = other DNA
tttcaagcctcaggcc

SEQ ID NO: 676 - DNA, 16 bp, synthetic construct
  misc_feature 1..16: note = Description of Artificial Sequence: Syntheticoligonucleotide
  source 1..16: mol_type = other DNA
ccccatagttgcaccc

SEQ ID NO: 677 - DNA, 16 bp, synthetic construct
  misc_feature 1..16: note = Description of Artificial Sequence: Syntheticoligonucleotide
  source 1..16: mol_type = other DNA
aaggtcggcacctgta

SEQ ID NO: 678 - DNA, 16 bp, synthetic construct
  misc_feature 1..16: note = Description of Artificial Sequence: Syntheticoligonucleotide
  source 1..16: mol_type = other DNA
acacatagctatgctc

SEQ ID NO: 679 - DNA, 16 bp, synthetic construct
  misc_feature 1..16: note = Description of Artificial Sequence: Syntheticoligonucleotide
  source 1..16: mol_type = other DNA
caaatactctgcactg

SEQ ID NO: 680 - DNA, 16 bp, synthetic construct
  misc_feature 1..16: note = Description of Artificial Sequence: Syntheticoligonucleotide
  source 1..16: mol_type = other DNA
atagcctacactgctc

SEQ ID NO: 681 - DNA, 16 bp, synthetic construct
  misc_feature 1..16: note = Description of Artificial Sequence: Syntheticoligonucleotide
  source 1..16: mol_type = other DNA
actagctttgtaaagc

SEQ ID NO: 682 - DNA, 16 bp, synthetic construct
  misc_feature 1..16: note = Description of Artificial Sequence: Syntheticoligonucleotide
  source 1..16: mol_type = other DNA
ctggcagagaagctta

SEQ ID NO: 683 - DNA, 16 bp, synthetic construct
  misc_feature 1..16: note = Description of Artificial Sequence: Syntheticoligonucleotide
  source 1..16: mol_type = other DNA
tcttactacttattgg

SEQ ID NO: 684 - DNA, 16 bp, synthetic construct
  misc_feature 1..16: note = Description of Artificial Sequence: Syntheticoligonucleotide
  source 1..16: mol_type = other DNA
catgaggagtagcagg

SEQ ID NO: 685 - DNA, 16 bp, synthetic construct
  misc_feature 1..16: note = Description of Artificial Sequence: Syntheticoligonucleotide
  source 1..16: mol_type = other DNA
gctgctaagggttgtg

SEQ ID NO: 686 - DNA, 16 bp, synthetic construct
  misc_feature 1..16: note = Description of Artificial Sequence: Syntheticoligonucleotide
  source 1..16: mol_type = other DNA
cattacctgctgctcc

SEQ ID NO: 687 - DNA, 16 bp, synthetic construct
  misc_feature 1..16: note = Description of Artificial Sequence: Syntheticoligonucleotide
  source 1..16: mol_type = other DNA
aaacatgaggcctcag

SEQ ID NO: 688 - DNA, 16 bp, synthetic construct
  misc_feature 1..16: note = Description of Artificial Sequence: Syntheticoligonucleotide
  source 1..16: mol_type = other DNA
gatcttagagtcagag

SEQ ID NO: 689 - DNA, 16 bp, synthetic construct
  misc_feature 1..16: note = Description of Artificial Sequence: Syntheticoligonucleotide
  source 1..16: mol_type = other DNA
gtacattcgcatcatg

SEQ ID NO: 690 - DNA, 16 bp, synthetic construct
  misc_feature 1..16: note = Description of Artificial Sequence: Syntheticoligonucleotide
  source 1..16: mol_type = other DNA
agaggcttaaacttcc

SEQ ID NO: 691 - DNA, 16 bp, synthetic construct
  misc_feature 1..16: note = Description of Artificial Sequence: Syntheticoligonucleotide
  source 1..16: mol_type = other DNA
cggatgcattttccca

SEQ ID NO: 692 - DNA, 16 bp, synthetic construct
  misc_feature 1..16: note = Description of Artificial Sequence: Syntheticoligonucleotide
  source 1..16: mol_type = other DNA
gtccagagtgggtgag

SEQ ID NO: 693 - DNA, 16 bp, synthetic construct
  misc_feature 1..16: note = Description of Artificial Sequence: Syntheticoligonucleotide
  source 1..16: mol_type = other DNA
ccgattttccttggtc

SEQ ID NO: 694 - DNA, 16 bp, synthetic construct
  misc_feature 1..16: note = Description of Artificial Sequence: Syntheticoligonucleotide
  source 1..16: mol_type = other DNA
tcaaggtctctgatcc

SEQ ID NO: 695 - DNA, 16 bp, synthetic construct
  misc_feature 1..16: note = Description of Artificial Sequence: Syntheticoligonucleotide
  source 1..16: mol_type = other DNA
tccccgaggttgaaaa

SEQ ID NO: 696 - DNA, 16 bp, synthetic construct
  misc_feature 1..16: note = Description of Artificial Sequence: Syntheticoligonucleotide
  source 1..16: mol_type = other DNA
ctgagatctcaccgtc

SEQ ID NO: 697 - DNA, 16 bp, synthetic construct
  misc_feature 1..16: note = Description of Artificial Sequence: Syntheticoligonucleotide
  source 1..16: mol_type = other DNA
atcaagccccatgcag

SEQ ID NO: 698 - DNA, 16 bp, synthetic construct
  misc_feature 1..16: note = Description of Artificial Sequence: Syntheticoligonucleotide
  source 1..16: mol_type = other DNA
acatttgaggcacggc

SEQ ID NO: 699 - DNA, 16 bp, synthetic construct
  misc_feature 1..16: note = Description of Artificial Sequence: Syntheticoligonucleotide
  source 1..16: mol_type = other DNA
tagggcaaggtgcaga

SEQ ID NO: 700 - DNA, 16 bp, synthetic construct
  misc_feature 1..16: note = Description of Artificial Sequence: Syntheticoligonucleotide
  source 1..16: mol_type = other DNA
agttaaggatcaaatg

SEQ ID NO: 701 - DNA, 16 bp, synthetic construct
  misc_feature 1..16: note = Description of Artificial Sequence: Syntheticoligonucleotide
  source 1..16: mol_type = other DNA
attacagagtcagcga

SEQ ID NO: 702 - DNA, 16 bp, synthetic construct
  misc_feature 1..16: note = Description of Artificial Sequence: Syntheticoligonucleotide
  source 1..16: mol_type = other DNA
ccagagatggtttgaa

SEQ ID NO: 703 - DNA, 16 bp, synthetic construct
  misc_feature 1..16: note = Description of Artificial Sequence: Syntheticoligonucleotide
  source 1..16: mol_type = other DNA
ttaggtaagggatcag

SEQ ID NO: 704 - DNA, 16 bp, synthetic construct
  misc_feature 1..16: note = Description of Artificial Sequence: Syntheticoligonucleotide
  source 1..16: mol_type = other DNA
cgtcatggcggccgga

SEQ ID NO: 705 - DNA, 16 bp, synthetic construct
  misc_feature 1..16: note = Description of Artificial Sequence: Syntheticoligonucleotide
  source 1..16: mol_type = other DNA
aatttttttcgatgag

SEQ ID NO: 706 - DNA, 16 bp, synthetic construct
  misc_feature 1..16: note = Description of Artificial Sequence: Syntheticoligonucleotide
  source 1..16: mol_type = other DNA
tgaagtggactgacag

SEQ ID NO: 707 - DNA, 16 bp, synthetic construct
  misc_feature 1..16: note = Description of Artificial Sequence: Syntheticoligonucleotide
  source 1..16: mol_type = other DNA
ctcggccctggaaggt

SEQ ID NO: 708 - DNA, 16 bp, synthetic construct
  misc_feature 1..16: note = Description of Artificial Sequence: Syntheticoligonucleotide
  source 1..16: mol_type = other DNA
tggaggagtgcctgta

SEQ ID NO: 709 - DNA, 16 bp, synthetic construct
  misc_feature 1..16: note = Description of Artificial Sequence: Syntheticoligonucleotide
  source 1..16: mol_type = other DNA
caggccgggccttgag

SEQ ID NO: 710 - DNA, 16 bp, synthetic construct
  misc_feature 1..16: note = Description of Artificial Sequence: Syntheticoligonucleotide
  source 1..16: mol_type = other DNA
aagaccttctcacatc

SEQ ID NO: 711 - DNA, 16 bp, synthetic construct
  misc_feature 1..16: note = Description of Artificial Sequence: Syntheticoligonucleotide
  source 1..16: mol_type = other DNA
gagactgtaccatctc

SEQ ID NO: 712 - DNA, 16 bp, synthetic construct
  misc_feature 1..16: note = Description of Artificial Sequence: Syntheticoligonucleotide
  source 1..16: mol_type = other DNA
tccggacagcaaacag

SEQ ID NO: 713 - DNA, 16 bp, synthetic construct
  misc_feature 1..16: note = Description of Artificial Sequence: Syntheticoligonucleotide
  source 1..16: mol_type = other DNA
gtgtccgctgcttctc

SEQ ID NO: 714 - DNA, 16 bp, synthetic construct
  misc_feature 1..16: note = Description of Artificial Sequence: Syntheticoligonucleotide
  source 1..16: mol_type = other DNA
ttggaacacctgctgg

SEQ ID NO: 715 - DNA, 16 bp, synthetic construct
  misc_feature 1..16: note = Description of Artificial Sequence: Syntheticoligonucleotide
  source 1..16: mol_type = other DNA
tgcagggctcgactgg

SEQ ID NO: 716 - DNA, 16 bp, synthetic construct
  misc_feature 1..16: note = Description of Artificial Sequence: Syntheticoligonucleotide
  source 1..16: mol_type = other DNA
gtactgaggcaggctc

SEQ ID NO: 717 - DNA, 16 bp, synthetic construct
  misc_feature 1..16: note = Description of Artificial Sequence: Syntheticoligonucleotide
  source 1..16: mol_type = other DNA
tctgtgtaggcctctg

SEQ ID NO: 718 - DNA, 16 bp, synthetic construct
  misc_feature 1..16: note = Description of Artificial Sequence: Syntheticoligonucleotide
  source 1..16: mol_type = other DNA
atggatcagggctcag

SEQ ID NO: 719 - DNA, 16 bp, synthetic construct
  misc_feature 1..16: note = Description of Artificial Sequence: Syntheticoligonucleotide
  source 1..16: mol_type = other DNA
cgaggatccttcccag

SEQ ID NO: 720 - DNA, 16 bp, synthetic construct
  misc_feature 1..16: note = Description of Artificial Sequence: Syntheticoligonucleotide
  source 1..16: mol_type = other DNA
ccactttgagctgcga

SEQ ID NO: 721 - DNA, 16 bp, synthetic construct
  misc_feature 1..16: note = Description of Artificial Sequence: Syntheticoligonucleotide
  source 1..16: mol_type = other DNA
ctcaccttggtgaagt

SEQ ID NO: 722 - DNA, 16 bp, synthetic construct
  misc_feature 1..16: note = Description of Artificial Sequence: Syntheticoligonucleotide
  source 1..16: mol_type = other DNA
agaccttacctggctg

SEQ ID NO: 723 - DNA, 16 bp, synthetic construct
  misc_feature 1..16: note = Description of Artificial Sequence: Syntheticoligonucleotide
  source 1..16: mol_type = other DNA
aattttcagttgcacc

SEQ ID NO: 724 - DNA, 16 bp, synthetic construct
  misc_feature 1..16: note = Description of Artificial Sequence: Syntheticoligonucleotide
  source 1..16: mol_type = other DNA
aaaggagatcgatgga

SEQ ID NO: 725 - DNA, 16 bp, synthetic construct
  misc_feature 1..16: note = Description of Artificial Sequence: Syntheticoligonucleotide
  source 1..16: mol_type = other DNA
aacagaactgatgctc

SEQ ID NO: 726 - DNA, 16 bp, synthetic construct
  misc_feature 1..16: note = Description of Artificial Sequence: Syntheticoligonucleotide
  source 1..16: mol_type = other DNA
tcctctaaagcgatac

SEQ ID NO: 727 - DNA, 16 bp, synthetic construct
  misc_feature 1..16: note = Description of Artificial Sequence: Syntheticoligonucleotide
  source 1..16: mol_type = other DNA
cagaatcgagctcacc

SEQ ID NO: 728 - DNA, 16 bp, synthetic construct
  misc_feature 1..16: note = Description of Artificial Sequence: Syntheticoligonucleotide
  source 1..16: mol_type = other DNA
tccaacaatcggcact

SEQ ID NO: 729 - DNA, 16 bp, synthetic construct
  misc_feature 1..16: note = Description of Artificial Sequence: Syntheticoligonucleotide
  source 1..16: mol_type = other DNA
agtagagggagcataa

SEQ ID NO: 730 - DNA, 16 bp, synthetic construct
  misc_feature 1..16: note = Description of Artificial Sequence: Syntheticoligonucleotide
  source 1..16: mol_type = other DNA
aacaccctattaggag

SEQ ID NO: 731 - DNA, 16 bp, synthetic construct
  misc_feature 1..16: note = Description of Artificial Sequence: Syntheticoligonucleotide
  source 1..16: mol_type = other DNA
ctatttgactgtataa

SEQ ID NO: 732 - DNA, 16 bp, synthetic construct
  misc_feature 1..16: note = Description of Artificial Sequence: Syntheticoligonucleotide
  source 1..16: mol_type = other DNA
gtacccacactcttaa

SEQ ID NO: 733 - DNA, 16 bp, synthetic construct
  misc_feature 1..16: note = Description of Artificial Sequence: Syntheticoligonucleotide
  source 1..16: mol_type = other DNA
taatgctgatcttggg

SEQ ID NO: 734 - DNA, 16 bp, synthetic construct
  misc_feature 1..16: note = Description of Artificial Sequence: Syntheticoligonucleotide
  source 1..16: mol_type = other DNA
attgagtgaatagtca

SEQ ID NO: 735 - DNA, 16 bp, synthetic construct
  misc_feature 1..16: note = Description of Artificial Sequence: Syntheticoligonucleotide
  source 1..16: mol_type = other DNA
attgtattgcaaagca

SEQ ID NO: 736 - DNA, 16 bp, synthetic construct
  misc_feature 1..16: note = Description of Artificial Sequence: Syntheticoligonucleotide
  source 1..16: mol_type = other DNA
cgagcaagagagaaca

SEQ ID NO: 737 - DNA, 16 bp, synthetic construct
  misc_feature 1..16: note = Description of Artificial Sequence: Syntheticoligonucleotide
  source 1..16: mol_type = other DNA
gttaagtcattaggtg

SEQ ID NO: 738 - DNA, 16 bp, synthetic construct
  misc_feature 1..16: note = Description of Artificial Sequence: Syntheticoligonucleotide
  source 1..16: mol_type = other DNA
gagtcctgagatctag

SEQ ID NO: 739 - DNA, 16 bp, synthetic construct
  misc_feature 1..16: note = Description of Artificial Sequence: Syntheticoligonucleotide
  source 1..16: mol_type = other DNA
aatcaaggttttcggg

SEQ ID NO: 740 - DNA, 16 bp, synthetic construct
  misc_feature 1..16: note = Description of Artificial Sequence: Syntheticoligonucleotide
  source 1..16: mol_type = other DNA
tccctagggcctcagt

SEQ ID NO: 741 - DNA, 16 bp, synthetic construct
  misc_feature 1..16: note = Description of Artificial Sequence: Syntheticoligonucleotide
  source 1..16: mol_type = other DNA
atagtataacaccagg

SEQ ID NO: 742 - DNA, 16 bp, synthetic construct
  misc_feature 1..16: note = Description of Artificial Sequence: Syntheticoligonucleotide
  source 1..16: mol_type = other DNA
ctatgacaagccccta

SEQ ID NO: 743 - DNA, 16 bp, synthetic construct
  misc_feature 1..16: note = Description of Artificial Sequence: Syntheticoligonucleotide
  source 1..16: mol_type = other DNA
ctgggcagccggcttc

SEQ ID NO: 744 - DNA, 16 bp, synthetic construct
  misc_feature 1..16: note = Description of Artificial Sequence: Syntheticoligonucleotide
  source 1..16: mol_type = other DNA
gacacttggccagagc

SEQ ID NO: 745 - DNA, 16 bp, synthetic construct
  misc_feature 1..16: note = Description of Artificial Sequence: Syntheticoligonucleotide
  source 1..16: mol_type = other DNA
aacaggagtgtgggtc

SEQ ID NO: 746 - DNA, 16 bp, synthetic construct
  misc_feature 1..16: note = Description of Artificial Sequence: Syntheticoligonucleotide
  source 1..16: mol_type = other DNA
tcacagcactgagttg

SEQ ID NO: 747 - DNA, 16 bp, synthetic construct
  misc_feature 1..16: note = Description of Artificial Sequence: Syntheticoligonucleotide
  source 1..16: mol_type = other DNA
tataatcctggtctga

SEQ ID NO: 748 - DNA, 16 bp, synthetic construct
  misc_feature 1..16: note = Description of Artificial Sequence: Syntheticoligonucleotide
  source 1..16: mol_type = other DNA
ccccaatttctggccc

SEQ ID NO: 749 - DNA, 16 bp, synthetic construct
  misc_feature 1..16: note = Description of Artificial Sequence: Syntheticoligonucleotide
  source 1..16: mol_type = other DNA
cagggcaaggaggcga

SEQ ID NO: 750 - DNA, 16 bp, synthetic construct
  misc_feature 1..16: note = Description of Artificial Sequence: Syntheticoligonucleotide
  source 1..16: mol_type = other DNA
agctggaaggaccgag

SEQ ID NO: 751 - DNA, 16 bp, synthetic construct
  misc_feature 1..16: note = Description of Artificial Sequence: Syntheticoligonucleotide
  source 1..16: mol_type = other DNA
acagaatgggctggtg

SEQ ID NO: 752 - DNA, 16 bp, synthetic construct
  misc_feature 1..16: note = Description of Artificial Sequence: Syntheticoligonucleotide
  source 1..16: mol_type = other DNA
gctgtttcaagcctca

SEQ ID NO: 753 - DNA, 16 bp, synthetic construct
  misc_feature 1..16: note = Description of Artificial Sequence: Syntheticoligonucleotide
  source 1..16: mol_type = other DNA
ggacatgtcccgaggg

SEQ ID NO: 754 - DNA, 16 bp, synthetic construct
  misc_feature 1..16: note = Description of Artificial Sequence: Syntheticoligonucleotide
  source 1..16: mol_type = other DNA
aaaggtcggcacctgt

SEQ ID NO: 755 - DNA, 16 bp, synthetic construct
  misc_feature 1..16: note = Description of Artificial Sequence: Syntheticoligonucleotide
  source 1..16: mol_type = other DNA
gacacatagctatgct

SEQ ID NO: 756 - DNA, 16 bp, synthetic construct
  misc_feature 1..16: note = Description of Artificial Sequence: Syntheticoligonucleotide
  source 1..16: mol_type = other DNA
ttcaaatactctgcac

SEQ ID NO: 757 - DNA, 16 bp, synthetic construct
  misc_feature 1..16: note = Description of Artificial Sequence: Syntheticoligonucleotide
  source 1..16: mol_type = other DNA
aatagcctacactgct

SEQ ID NO: 758 - DNA, 16 bp, synthetic construct
  misc_feature 1..16: note = Description of Artificial Sequence: Syntheticoligonucleotide
  source 1..16: mol_type = other DNA
gactagctttgtaaag

SEQ ID NO: 759 - DNA, 16 bp, synthetic construct
  misc_feature 1..16: note = Description of Artificial Sequence: Syntheticoligonucleotide
  source 1..16: mol_type = other DNA
cgaaaaccctgactcc

SEQ ID NO: 760 - DNA, 16 bp, synthetic construct
  misc_feature 1..16: note = Description of Artificial Sequence: Syntheticoligonucleotide
  source 1..16: mol_type = other DNA
atcttactacttattg

SEQ ID NO: 761 - DNA, 16 bp, synthetic construct
  misc_feature 1..16: note = Description of Artificial Sequence: Syntheticoligonucleotide
  source 1..16: mol_type = other DNA
gcatgaggagtagcag

SEQ ID NO: 762 - DNA, 16 bp, synthetic construct
  misc_feature 1..16: note = Description of Artificial Sequence: Syntheticoligonucleotide
  source 1..16: mol_type = other DNA
gtgcaaaggcctggct

SEQ ID NO: 763 - DNA, 16 bp, synthetic construct
  misc_feature 1..16: note = Description of Artificial Sequence: Syntheticoligonucleotide
  source 1..16: mol_type = other DNA
tggcattacctgctgc

SEQ ID NO: 764 - DNA, 16 bp, synthetic construct
  misc_feature 1..16: note = Description of Artificial Sequence: Syntheticoligonucleotide
  source 1..16: mol_type = other DNA
caaacatgaggcctca

SEQ ID NO: 765 - DNA, 16 bp, synthetic construct
  misc_feature 1..16: note = Description of Artificial Sequence: Syntheticoligonucleotide
  source 1..16: mol_type = other DNA
gatcacagtgtttggg

SEQ ID NO: 766 - DNA, 16 bp, synthetic construct
  misc_feature 1..16: note = Description of Artificial Sequence: Syntheticoligonucleotide
  source 1..16: mol_type = other DNA
taaacccccctggcct

SEQ ID NO: 767 - DNA, 16 bp, synthetic construct
  misc_feature 1..16: note = Description of Artificial Sequence: Syntheticoligonucleotide
  source 1..16: mol_type = other DNA
ccagaggcttaaactt

SEQ ID NO: 768 - DNA, 16 bp, synthetic construct
  misc_feature 1..16: note = Description of Artificial Sequence: Syntheticoligonucleotide
  source 1..16: mol_type = other DNA
gagcggatgcattttc

SEQ ID NO: 769 - DNA, 16 bp, synthetic construct
  misc_feature 1..16: note = Description of Artificial Sequence: Syntheticoligonucleotide
  source 1..16: mol_type = other DNA
gtagctggagtccaga

SEQ ID NO: 770 - DNA, 16 bp, synthetic construct
  misc_feature 1..16: note = Description of Artificial Sequence: Syntheticoligonucleotide
  source 1..16: mol_type = other DNA
cccgattttccttggt

SEQ ID NO: 771 - DNA, 16 bp, synthetic construct
  misc_feature 1..16: note = Description of Artificial Sequence: Syntheticoligonucleotide
  source 1..16: mol_type = other DNA
gtcaaggtctctgatc

SEQ ID NO: 772 - DNA, 16 bp, synthetic construct
  misc_feature 1..16: note = Description of Artificial Sequence: Syntheticoligonucleotide
  source 1..16: mol_type = other DNA
aatagttctccccgag

SEQ ID NO: 773 - DNA, 16 bp, synthetic construct
  misc_feature 1..16: note = Description of Artificial Sequence: Syntheticoligonucleotide
  source 1..16: mol_type = other DNA
cctgagatctcaccgt

SEQ ID NO: 774 - DNA, 16 bp, synthetic construct
  misc_feature 1..16: note = Description of Artificial Sequence: Syntheticoligonucleotide
  source 1..16: mol_type = other DNA
aatcaagccccatgca

SEQ ID NO: 775 - DNA, 16 bp, synthetic construct
  misc_feature 1..16: note = Description of Artificial Sequence: Syntheticoligonucleotide
  source 1..16: mol_type = other DNA
tgcggacaggtttggg

SEQ ID NO: 776 - DNA, 16 bp, synthetic construct
  misc_feature 1..16: note = Description of Artificial Sequence: Syntheticoligonucleotide
  source 1..16: mol_type = other DNA
tttagggcaaggtgca

SEQ ID NO: 777 - DNA, 16 bp, synthetic construct
  misc_feature 1..16: note = Description of Artificial Sequence: Syntheticoligonucleotide
  source 1..16: mol_type = other DNA
aagttaaggatcaaat

SEQ ID NO: 778 - DNA, 16 bp, synthetic construct
  misc_feature 1..16: note = Description of Artificial Sequence: Syntheticoligonucleotide
  source 1..16: mol_type = other DNA
gattacagagtcagcg

SEQ ID NO: 779 - DNA, 16 bp, synthetic construct
  misc_feature 1..16: note = Description of Artificial Sequence: Syntheticoligonucleotide
  source 1..16: mol_type = other DNA
tttaggtcagaagcca

SEQ ID NO: 780 - DNA, 16 bp, synthetic construct
  misc_feature 1..16: note = Description of Artificial Sequence: Syntheticoligonucleotide
  source 1..16: mol_type = other DNA
attaggtaagggatca

SEQ ID NO: 781 - DNA, 16 bp, synthetic construct
  misc_feature 1..16: note = Description of Artificial Sequence: Syntheticoligonucleotide
  source 1..16: mol_type = other DNA
caaatttttttcgatg

SEQ ID NO: 782 - DNA, 16 bp, synthetic construct
  misc_feature 1..16: note = Description of Artificial Sequence: Syntheticoligonucleotide
  source 1..16: mol_type = other DNA
tggtgaagtggactga

SEQ ID NO: 783 - DNA, 16 bp, synthetic construct
  misc_feature 1..16: note = Description of Artificial Sequence: Syntheticoligonucleotide
  source 1..16: mol_type = other DNA
tctcggccctggaagg

SEQ ID NO: 784 - DNA, 16 bp, synthetic construct
  misc_feature 1..16: note = Description of Artificial Sequence: Syntheticoligonucleotide
  source 1..16: mol_type = other DNA
ctggaggagtgcctgt

SEQ ID NO: 785 - DNA, 16 bp, synthetic construct
  misc_feature 1..16: note = Description of Artificial Sequence: Syntheticoligonucleotide
  source 1..16: mol_type = other DNA
tgatcccaggtgggag

SEQ ID NO: 786 - DNA, 16 bp, synthetic construct
  misc_feature 1..16: note = Description of Artificial Sequence: Syntheticoligonucleotide
  source 1..16: mol_type = other DNA
cgaagaccttctcaca

SEQ ID NO: 787 - DNA, 16 bp, synthetic construct
  misc_feature 1..16: note = Description of Artificial Sequence: Syntheticoligonucleotide
  source 1..16: mol_type = other DNA
tccagagactgtacca

SEQ ID NO: 788 - DNA, 16 bp, synthetic construct
  misc_feature 1..16: note = Description of Artificial Sequence: Syntheticoligonucleotide
  source 1..16: mol_type = other DNA
ctccggacagcaaaca

SEQ ID NO: 789 - DNA, 16 bp, synthetic construct
  misc_feature 1..16: note = Description of Artificial Sequence: Syntheticoligonucleotide
  source 1..16: mol_type = other DNA
gagtgtccgctgcttc

SEQ ID NO: 790 - DNA, 16 bp, synthetic construct
  misc_feature 1..16: note = Description of Artificial Sequence: Syntheticoligonucleotide
  source 1..16: mol_type = other DNA
gggttggaacacctgc

SEQ ID NO: 791 - DNA, 16 bp, synthetic construct
  misc_feature 1..16: note = Description of Artificial Sequence: Syntheticoligonucleotide
  source 1..16: mol_type = other DNA
gctgcagggctcgact

SEQ ID NO: 792 - DNA, 16 bp, synthetic construct
  misc_feature 1..16: note = Description of Artificial Sequence: Syntheticoligonucleotide
  source 1..16: mol_type = other DNA
tgtactgaggcaggct

SEQ ID NO: 793 - DNA, 16 bp, synthetic construct
  misc_feature 1..16: note = Description of Artificial Sequence: Syntheticoligonucleotide
  source 1..16: mol_type = other DNA
cgctgcttctgtgtag

SEQ ID NO: 794 - DNA, 16 bp, synthetic construct
  misc_feature 1..16: note = Description of Artificial Sequence: Syntheticoligonucleotide
  source 1..16: mol_type = other DNA
catggatcagggctca

SEQ ID NO: 795 - DNA, 16 bp, synthetic construct
  misc_feature 1..16: note = Description of Artificial Sequence: Syntheticoligonucleotide
  source 1..16: mol_type = other DNA
gcgaggatccttccca

SEQ ID NO: 796 - DNA, 16 bp, synthetic construct
  misc_feature 1..16: note = Description of Artificial Sequence: Syntheticoligonucleotide
  source 1..16: mol_type = other DNA
cccactttgagctgcg

SEQ ID NO: 797 - DNA, 16 bp, synthetic construct
  misc_feature 1..16: note = Description of Artificial Sequence: Syntheticoligonucleotide
  source 1..16: mol_type = other DNA
actcaccttggtgaag

SEQ ID NO: 798 - DNA, 16 bp, synthetic construct
  misc_feature 1..16: note = Description of Artificial Sequence: Syntheticoligonucleotide
  source 1..16: mol_type = other DNA
aagaccttacctggct

SEQ ID NO: 799 - DNA, 16 bp, synthetic construct
  misc_feature 1..16: note = Description of Artificial Sequence: Syntheticoligonucleotide
  source 1..16: mol_type = other DNA
catcaagagctaagag

SEQ ID NO: 800 - DNA, 16 bp, synthetic construct
  misc_feature 1..16: note = Description of Artificial Sequence: Syntheticoligonucleotide
  source 1..16: mol_type = other DNA
gaaaggagatcgatgg

SEQ ID NO: 801 - DNA, 16 bp, synthetic construct
  misc_feature 1..16: note = Description of Artificial Sequence: Syntheticoligonucleotide
  source 1..16: mol_type = other DNA
tgaacagaactgatgc

SEQ ID NO: 802 - DNA, 16 bp, synthetic construct
  misc_feature 1..16: note = Description of Artificial Sequence: Syntheticoligonucleotide
  source 1..16: mol_type = other DNA
aagggtctcctctaaa

SEQ ID NO: 803 - DNA, 16 bp, synthetic construct
  misc_feature 1..16: note = Description of Artificial Sequence: Syntheticoligonucleotide
  source 1..16: mol_type = other DNA
gcagaatcgagctcac

SEQ ID NO: 804 - DNA, 16 bp, synthetic construct
  misc_feature 1..16: note = Description of Artificial Sequence: Syntheticoligonucleotide
  source 1..16: mol_type = other DNA
gtccaacaatcggcac

SEQ ID NO: 805 - DNA, 16 bp, synthetic construct
  misc_feature 1..16: note = Description of Artificial Sequence: Syntheticoligonucleotide
  source 1..16: mol_type = other DNA
aagtagagggagcata

SEQ ID NO: 806 - DNA, 16 bp, synthetic construct
  misc_feature 1..16: note = Description of Artificial Sequence: Syntheticoligonucleotide
  source 1..16: mol_type = other DNA
gaacaccctattagga

SEQ ID NO: 807 - DNA, 16 bp, synthetic construct
  misc_feature 1..16: note = Description of Artificial Sequence: Syntheticoligonucleotide
  source 1..16: mol_type = other DNA
acctatttgactgtat

SEQ ID NO: 808 - DNA, 16 bp, synthetic construct
  misc_feature 1..16: note = Description of Artificial Sequence: Syntheticoligonucleotide
  source 1..16: mol_type = other DNA
agtacccacactctta

SEQ ID NO: 809 - DNA, 16 bp, synthetic construct
  misc_feature 1..16: note = Description of Artificial Sequence: Syntheticoligonucleotide
  source 1..16: mol_type = other DNA
ctaatgctgatcttgg

SEQ ID NO: 810 - DNA, 16 bp, synthetic construct
  misc_feature 1..16: note = Description of Artificial Sequence: Syntheticoligonucleotide
  source 1..16: mol_type = other DNA
ttattgagtgaatagt

SEQ ID NO: 811 - DNA, 16 bp, synthetic construct
  misc_feature 1..16: note = Description of Artificial Sequence: Syntheticoligonucleotide
  source 1..16: mol_type = other DNA
gaattgtattgcaaag

SEQ ID NO: 812 - DNA, 16 bp, synthetic construct
  misc_feature 1..16: note = Description of Artificial Sequence: Syntheticoligonucleotide
  source 1..16: mol_type = other DNA
gcgagcaagagagaac

SEQ ID NO: 813 - DNA, 16 bp, synthetic construct
  misc_feature 1..16: note = Description of Artificial Sequence: Syntheticoligonucleotide
  source 1..16: mol_type = other DNA
ggttaagtcattaggt

SEQ ID NO: 814 - DNA, 16 bp, synthetic construct
  misc_feature 1..16: note = Description of Artificial Sequence: Syntheticoligonucleotide
  source 1..16: mol_type = other DNA
tagagtcctgagatct

SEQ ID NO: 815 - DNA, 16 bp, synthetic construct
  misc_feature 1..16: note = Description of Artificial Sequence: Syntheticoligonucleotide
  source 1..16: mol_type = other DNA
cacaatcaaggttttc

SEQ ID NO: 816 - DNA, 16 bp, synthetic construct
  misc_feature 1..16: note = Description of Artificial Sequence: Syntheticoligonucleotide
  source 1..16: mol_type = other DNA
tagggcctcttgccta

SEQ ID NO: 817 - DNA, 16 bp, synthetic construct
  misc_feature 1..16: note = Description of Artificial Sequence: Syntheticoligonucleotide
  source 1..16: mol_type = other DNA
aatagtataacaccag

SEQ ID NO: 818 - DNA, 16 bp, synthetic construct
  misc_feature 1..16: note = Description of Artificial Sequence: Syntheticoligonucleotide
  source 1..16: mol_type = other DNA
ccactatgacaagccc

SEQ ID NO: 819 - DNA, 16 bp, synthetic construct
  misc_feature 1..16: note = Description of Artificial Sequence: Syntheticoligonucleotide
  source 1..16: mol_type = other DNA
atttttccgccattga

SEQ ID NO: 820 - DNA, 16 bp, synthetic construct
  misc_feature 1..16: note = Description of Artificial Sequence: Syntheticoligonucleotide
  source 1..16: mol_type = other DNA
ggacctagagggccgg

SEQ ID NO: 821 - DNA, 16 bp, synthetic construct
  misc_feature 1..16: note = Description of Artificial Sequence: Syntheticoligonucleotide
  source 1..16: mol_type = other DNA
ggacacttggccagag

SEQ ID NO: 822 - DNA, 16 bp, synthetic construct
  misc_feature 1..16: note = Description of Artificial Sequence: Syntheticoligonucleotide
  source 1..16: mol_type = other DNA
cgtgagaaacaggagt

SEQ ID NO: 823 - DNA, 16 bp, synthetic construct
  misc_feature 1..16: note = Description of Artificial Sequence: Syntheticoligonucleotide
  source 1..16: mol_type = other DNA
ccgttccacctcacag

SEQ ID NO: 824 - DNA, 16 bp, synthetic construct
  misc_feature 1..16: note = Description of Artificial Sequence: Syntheticoligonucleotide
  source 1..16: mol_type = other DNA
ctataatcctggtctg

SEQ ID NO: 825 - DNA, 16 bp, synthetic construct
  misc_feature 1..16: note = Description of Artificial Sequence: Syntheticoligonucleotide
  source 1..16: mol_type = other DNA
tcagagttcaccccaa

SEQ ID NO: 826 - DNA, 16 bp, synthetic construct
  misc_feature 1..16: note = Description of Artificial Sequence: Syntheticoligonucleotide
  source 1..16: mol_type = other DNA
tcagggcaaggaggcg

SEQ ID NO: 827 - DNA, 16 bp, synthetic construct
  misc_feature 1..16: note = Description of Artificial Sequence: Syntheticoligonucleotide
  source 1..16: mol_type = other DNA
cagctggaaggaccga

SEQ ID NO: 828 - DNA, 16 bp, synthetic construct
  misc_feature 1..16: note = Description of Artificial Sequence: Syntheticoligonucleotide
  source 1..16: mol_type = other DNA
cacagaatgggctggt

SEQ ID NO: 829 - DNA, 16 bp, synthetic construct
  misc_feature 1..16: note = Description of Artificial Sequence: Syntheticoligonucleotide
  source 1..16: mol_type = other DNA
cttgagagctgtttca

SEQ ID NO: 830 - DNA, 16 bp, synthetic construct
  misc_feature 1..16: note = Description of Artificial Sequence: Syntheticoligonucleotide
  source 1..16: mol_type = other DNA
tgggacatgtcccgag

SEQ ID NO: 831 - DNA, 16 bp, synthetic construct
  misc_feature 1..16: note = Description of Artificial Sequence: Syntheticoligonucleotide
  source 1..16: mol_type = other DNA
taaaggtcggcacctg

SEQ ID NO: 832 - DNA, 16 bp, synthetic construct
  misc_feature 1..16: note = Description of Artificial Sequence: Syntheticoligonucleotide
  source 1..16: mol_type = other DNA
ggacacatagctatgc

SEQ ID NO: 833 - DNA, 16 bp, synthetic construct
  misc_feature 1..16: note = Description of Artificial Sequence: Syntheticoligonucleotide
  source 1..16: mol_type = other DNA
gaggccatcctgatcc

SEQ ID NO: 834 - DNA, 16 bp, synthetic construct
  misc_feature 1..16: note = Description of Artificial Sequence: Syntheticoligonucleotide
  source 1..16: mol_type = other DNA
gaatagcctacactgc

SEQ ID NO: 835 - DNA, 16 bp, synthetic construct
  misc_feature 1..16: note = Description of Artificial Sequence: Syntheticoligonucleotide
  source 1..16: mol_type = other DNA
ttgactagctttgtaa

SEQ ID NO: 836 - DNA, 16 bp, synthetic construct
  misc_feature 1..16: note = Description of Artificial Sequence: Syntheticoligonucleotide
  source 1..16: mol_type = other DNA
tcgaaaaccctgactc

SEQ ID NO: 837 - DNA, 16 bp, synthetic construct
  misc_feature 1..16: note = Description of Artificial Sequence: Syntheticoligonucleotide
  source 1..16: mol_type = other DNA
gtttagctcttgcatc

SEQ ID NO: 838 - DNA, 16 bp, synthetic construct
  misc_feature 1..16: note = Description of Artificial Sequence: Syntheticoligonucleotide
  source 1..16: mol_type = other DNA
ttggcatgaggagtag

SEQ ID NO: 839 - DNA, 16 bp, synthetic construct
  misc_feature 1..16: note = Description of Artificial Sequence: Syntheticoligonucleotide
  source 1..16: mol_type = other DNA
ggacggcctgtgcaaa

SEQ ID NO: 840 - DNA, 16 bp, synthetic construct
  misc_feature 1..16: note = Description of Artificial Sequence: Syntheticoligonucleotide
  source 1..16: mol_type = other DNA
ctggcattacctgctg

SEQ ID NO: 841 - DNA, 16 bp, synthetic construct
  misc_feature 1..16: note = Description of Artificial Sequence: Syntheticoligonucleotide
  source 1..16: mol_type = other DNA
acaaacatgaggcctc

SEQ ID NO: 842 - DNA, 16 bp, synthetic construct
  misc_feature 1..16: note = Description of Artificial Sequence: Syntheticoligonucleotide
  source 1..16: mol_type = other DNA
tcaggatcacagtgtt

SEQ ID NO: 843 - DNA, 16 bp, synthetic construct
  misc_feature 1..16: note = Description of Artificial Sequence: Syntheticoligonucleotide
  source 1..16: mol_type = other DNA
ctaaacccccctggcc

SEQ ID NO: 844 - DNA, 16 bp, synthetic construct
  misc_feature 1..16: note = Description of Artificial Sequence: Syntheticoligonucleotide
  source 1..16: mol_type = other DNA
cccagaggcttaaact

SEQ ID NO: 845 - DNA, 16 bp, synthetic construct
  misc_feature 1..16: note = Description of Artificial Sequence: Syntheticoligonucleotide
  source 1..16: mol_type = other DNA
tgagcggatgcatttt

SEQ ID NO: 846 - DNA, 16 bp, synthetic construct
  misc_feature 1..16: note = Description of Artificial Sequence: Syntheticoligonucleotide
  source 1..16: mol_type = other DNA
tagtagctggagtcca

SEQ ID NO: 847 - DNA, 16 bp, synthetic construct
  misc_feature 1..16: note = Description of Artificial Sequence: Syntheticoligonucleotide
  source 1..16: mol_type = other DNA
ccccgattttccttgg

SEQ ID NO: 848 - DNA, 16 bp, synthetic construct
  misc_feature 1..16: note = Description of Artificial Sequence: Syntheticoligonucleotide
  source 1..16: mol_type = other DNA
agtcaaggtctctgat

SEQ ID NO: 849 - DNA, 16 bp, synthetic construct
  misc_feature 1..16: note = Description of Artificial Sequence: Syntheticoligonucleotide
  source 1..16: mol_type = other DNA
aaatagttctccccga

SEQ ID NO: 850 - DNA, 16 bp, synthetic construct
  misc_feature 1..16: note = Description of Artificial Sequence: Syntheticoligonucleotide
  source 1..16: mol_type = other DNA
gcctgagatctcaccg

SEQ ID NO: 851 - DNA, 16 bp, synthetic construct
  misc_feature 1..16: note = Description of Artificial Sequence: Syntheticoligonucleotide
  source 1..16: mol_type = other DNA
gaatcaagccccatgc

SEQ ID NO: 852 - DNA, 16 bp, synthetic construct
  misc_feature 1..16: note = Description of Artificial Sequence: Syntheticoligonucleotide
  source 1..16: mol_type = other DNA
gatttgcggacaggtt

SEQ ID NO: 853 - DNA, 16 bp, synthetic construct
  misc_feature 1..16: note = Description of Artificial Sequence: Syntheticoligonucleotide
  source 1..16: mol_type = other DNA
gtttagggcaaggtgc

SEQ ID NO: 854 - DNA, 16 bp, synthetic construct
  misc_feature 1..16: note = Description of Artificial Sequence: Syntheticoligonucleotide
  source 1..16: mol_type = other DNA
tgaagttaaggatcaa

SEQ ID NO: 855 - DNA, 16 bp, synthetic construct
  misc_feature 1..16: note = Description of Artificial Sequence: Syntheticoligonucleotide
  source 1..16: mol_type = other DNA
atgggattacagagtc

SEQ ID NO: 856 - DNA, 16 bp, synthetic construct
  misc_feature 1..16: note = Description of Artificial Sequence: Syntheticoligonucleotide
  source 1..16: mol_type = other DNA
ctttaggtcagaagcc

SEQ ID NO: 857 - DNA, 16 bp, synthetic construct
  misc_feature 1..16: note = Description of Artificial Sequence: Syntheticoligonucleotide
  source 1..16: mol_type = other DNA
gattaggtaagggatc

SEQ ID NO: 858 - DNA, 16 bp, synthetic construct
  misc_feature 1..16: note = Description of Artificial Sequence: Syntheticoligonucleotide
  source 1..16: mol_type = other DNA
ttttcgatgagtgtgt

SEQ ID NO: 859 - DNA, 16 bp, synthetic construct
  misc_feature 1..16: note = Description of Artificial Sequence: Syntheticoligonucleotide
  source 1..16: mol_type = other DNA
agcctggcttgtggga

SEQ ID NO: 860 - DNA, 16 bp, synthetic construct
  misc_feature 1..16: note = Description of Artificial Sequence: Syntheticoligonucleotide
  source 1..16: mol_type = other DNA
cctggaaggttccccc

SEQ ID NO: 861 - DNA, 16 bp, synthetic construct
  misc_feature 1..16: note = Description of Artificial Sequence: Syntheticoligonucleotide
  source 1..16: mol_type = other DNA
tgccccggagggtgcc

SEQ ID NO: 862 - DNA, 16 bp, synthetic construct
  misc_feature 1..16: note = Description of Artificial Sequence: Syntheticoligonucleotide
  source 1..16: mol_type = other DNA
gaagaccccagtggcg

SEQ ID NO: 863 - DNA, 16 bp, synthetic construct
  misc_feature 1..16: note = Description of Artificial Sequence: Syntheticoligonucleotide
  source 1..16: mol_type = other DNA
catttgccagcagtgg

SEQ ID NO: 864 - DNA, 16 bp, synthetic construct
  misc_feature 1..16: note = Description of Artificial Sequence: Syntheticoligonucleotide
  source 1..16: mol_type = other DNA
tggaggagacattgtg

SEQ ID NO: 865 - DNA, 16 bp, synthetic construct
  misc_feature 1..16: note = Description of Artificial Sequence: Syntheticoligonucleotide
  source 1..16: mol_type = other DNA
gaccaggctgggacga

SEQ ID NO: 866 - DNA, 16 bp, synthetic construct
  misc_feature 1..16: note = Description of Artificial Sequence: Syntheticoligonucleotide
  source 1..16: mol_type = other DNA
tcgcatgttgtggaac

SEQ ID NO: 867 - DNA, 16 bp, synthetic construct
  misc_feature 1..16: note = Description of Artificial Sequence: Syntheticoligonucleotide
  source 1..16: mol_type = other DNA
ggctccgtttcttgcg

SEQ ID NO: 868 - DNA, 16 bp, synthetic construct
  misc_feature 1..16: note = Description of Artificial Sequence: Syntheticoligonucleotide
  source 1..16: mol_type = other DNA
acagtggaaacctcac

SEQ ID NO: 869 - DNA, 16 bp, synthetic construct
  misc_feature 1..16: note = Description of Artificial Sequence: Syntheticoligonucleotide
  source 1..16: mol_type = other DNA
tgagggacaggattgt

SEQ ID NO: 870 - DNA, 16 bp, synthetic construct
  misc_feature 1..16: note = Description of Artificial Sequence: Syntheticoligonucleotide
  source 1..16: mol_type = other DNA
taggcctctgggcaca

SEQ ID NO: 871 - DNA, 16 bp, synthetic construct
  misc_feature 1..16: note = Description of Artificial Sequence: Syntheticoligonucleotide
  source 1..16: mol_type = other DNA
ttttggcaaggcagtg

SEQ ID NO: 872 - DNA, 16 bp, synthetic construct
  misc_feature 1..16: note = Description of Artificial Sequence: Syntheticoligonucleotide
  source 1..16: mol_type = other DNA
ccactgacctgtcctt

SEQ ID NO: 873 - DNA, 16 bp, synthetic construct
  misc_feature 1..16: note = Description of Artificial Sequence: Syntheticoligonucleotide
  source 1..16: mol_type = other DNA
gctgcgatggcacttg

SEQ ID NO: 874 - DNA, 16 bp, synthetic construct
  misc_feature 1..16: note = Description of Artificial Sequence: Syntheticoligonucleotide
  source 1..16: mol_type = other DNA
cttacctggctggaat

SEQ ID NO: 875 - DNA, 16 bp, synthetic construct
  misc_feature 1..16: note = Description of Artificial Sequence: Syntheticoligonucleotide
  source 1..16: mol_type = other DNA
ggacagcatttcaagt

SEQ ID NO: 876 - DNA, 16 bp, synthetic construct
  misc_feature 1..16: note = Description of Artificial Sequence: Syntheticoligonucleotide
  source 1..16: mol_type = other DNA
gagatcgatggagtgt

SEQ ID NO: 877 - DNA, 16 bp, synthetic construct
  misc_feature 1..16: note = Description of Artificial Sequence: Syntheticoligonucleotide
  source 1..16: mol_type = other DNA
gctcactctcataaaa

SEQ ID NO: 878 - DNA, 16 bp, synthetic construct
  misc_feature 1..16: note = Description of Artificial Sequence: Syntheticoligonucleotide
  source 1..16: mol_type = other DNA
ctaaagcgatacaagc

SEQ ID NO: 879 - DNA, 16 bp, synthetic construct
  misc_feature 1..16: note = Description of Artificial Sequence: Syntheticoligonucleotide
  source 1..16: mol_type = other DNA
atcgagctcaccccag

SEQ ID NO: 880 - DNA, 16 bp, synthetic construct
  misc_feature 1..16: note = Description of Artificial Sequence: Syntheticoligonucleotide
  source 1..16: mol_type = other DNA
caatcggcacttggtc

SEQ ID NO: 881 - DNA, 16 bp, synthetic construct
  misc_feature 1..16: note = Description of Artificial Sequence: Syntheticoligonucleotide
  source 1..16: mol_type = other DNA
aaataggacaaccttt

SEQ ID NO: 882 - DNA, 16 bp, synthetic construct
  misc_feature 1..16: note = Description of Artificial Sequence: Syntheticoligonucleotide
  source 1..16: mol_type = other DNA
ccctattaggagtaag

SEQ ID NO: 883 - DNA, 16 bp, synthetic construct
  misc_feature 1..16: note = Description of Artificial Sequence: Syntheticoligonucleotide
  source 1..16: mol_type = other DNA
ctatatatgtaatggc

SEQ ID NO: 884 - DNA, 16 bp, synthetic construct
  misc_feature 1..16: note = Description of Artificial Sequence: Syntheticoligonucleotide
  source 1..16: mol_type = other DNA
ttaacctctatagtaa

SEQ ID NO: 885 - DNA, 16 bp, synthetic construct
  misc_feature 1..16: note = Description of Artificial Sequence: Syntheticoligonucleotide
  source 1..16: mol_type = other DNA
atcttgggtttattgt

SEQ ID NO: 886 - DNA, 16 bp, synthetic construct
  misc_feature 1..16: note = Description of Artificial Sequence: Syntheticoligonucleotide
  source 1..16: mol_type = other DNA
tgaatagtcagtccat

SEQ ID NO: 887 - DNA, 16 bp, synthetic construct
  misc_feature 1..16: note = Description of Artificial Sequence: Syntheticoligonucleotide
  source 1..16: mol_type = other DNA
cagaatagaaagcttg

SEQ ID NO: 888 - DNA, 16 bp, synthetic construct
  misc_feature 1..16: note = Description of Artificial Sequence: Syntheticoligonucleotide
  source 1..16: mol_type = other DNA
ggagagccagagtgca

SEQ ID NO: 889 - DNA, 16 bp, synthetic construct
  misc_feature 1..16: note = Description of Artificial Sequence: Syntheticoligonucleotide
  source 1..16: mol_type = other DNA
gtcattaggtgtctgc

SEQ ID NO: 890 - DNA, 16 bp, synthetic construct
  misc_feature 1..16: note = Description of Artificial Sequence: Syntheticoligonucleotide
  source 1..16: mol_type = other DNA
ctgagatctaggcttg

SEQ ID NO: 891 - DNA, 16 bp, synthetic construct
  misc_feature 1..16: note = Description of Artificial Sequence: Syntheticoligonucleotide
  source 1..16: mol_type = other DNA
catcatcaccacgctc

SEQ ID NO: 892 - DNA, 16 bp, synthetic construct
  misc_feature 1..16: note = Description of Artificial Sequence: Syntheticoligonucleotide
  source 1..16: mol_type = other DNA
tcccaaatacatggcc

SEQ ID NO: 893 - DNA, 16 bp, synthetic construct
  misc_feature 1..16: note = Description of Artificial Sequence: Syntheticoligonucleotide
  source 1..16: mol_type = other DNA
tataacaccaggacct

SEQ ID NO: 894 - DNA, 16 bp, synthetic construct
  misc_feature 1..16: note = Description of Artificial Sequence: Syntheticoligonucleotide
  source 1..16: mol_type = other DNA
ccctagctctgaagac

SEQ ID NO: 895 - DNA, 16 bp, synthetic construct
  misc_feature 1..16: note = Description of Artificial Sequence: Syntheticoligonucleotide
  source 1..16: mol_type = other DNA
gccggatgcgccgggc

SEQ ID NO: 896 - DNA, 16 bp, synthetic construct
  misc_feature 1..16: note = Description of Artificial Sequence: Syntheticoligonucleotide
  source 1..16: mol_type = other DNA
cggcttcctgcactgt

SEQ ID NO: 897 - DNA, 16 bp, synthetic construct
  misc_feature 1..16: note = Description of Artificial Sequence: Syntheticoligonucleotide
  source 1..16: mol_type = other DNA
gccagagctaagaatt

SEQ ID NO: 898 - DNA, 16 bp, synthetic construct
  misc_feature 1..16: note = Description of Artificial Sequence: Syntheticoligonucleotide
  source 1..16: mol_type = other DNA
tccgaacaagggcctg

SEQ ID NO: 899 - DNA, 16 bp, synthetic construct
  misc_feature 1..16: note = Description of Artificial Sequence: Syntheticoligonucleotide
  source 1..16: mol_type = other DNA
ggagtatagaagggtt

SEQ ID NO: 900 - DNA, 16 bp, synthetic construct
  misc_feature 1..16: note = Description of Artificial Sequence: Syntheticoligonucleotide
  source 1..16: mol_type = other DNA
ctggaagggactgccc

SEQ ID NO: 901 - DNA, 16 bp, synthetic construct
  misc_feature 1..16: note = Description of Artificial Sequence: Syntheticoligonucleotide
  source 1..16: mol_type = other DNA
cctcaaatgcccactc

SEQ ID NO: 902 - DNA, 16 bp, synthetic construct
  misc_feature 1..16: note = Description of Artificial Sequence: Syntheticoligonucleotide
  source 1..16: mol_type = other DNA
caaggaggcgagtcca

SEQ ID NO: 903 - DNA, 16 bp, synthetic construct
  misc_feature 1..16: note = Description of Artificial Sequence: Syntheticoligonucleotide
  source 1..16: mol_type = other DNA
ggaaggaccgagctga

SEQ ID NO: 904 - DNA, 16 bp, synthetic construct
  misc_feature 1..16: note = Description of Artificial Sequence: Syntheticoligonucleotide
  source 1..16: mol_type = other DNA
aaggcgagaagtgggt

SEQ ID NO: 905 - DNA, 16 bp, synthetic construct
  misc_feature 1..16: note = Description of Artificial Sequence: Syntheticoligonucleotide
  source 1..16: mol_type = other DNA
tcggactttctcctcg

SEQ ID NO: 906 - DNA, 16 bp, synthetic construct
  misc_feature 1..16: note = Description of Artificial Sequence: Syntheticoligonucleotide
  source 1..16: mol_type = other DNA
gcagaggtccagcacc

SEQ ID NO: 907 - DNA, 16 bp, synthetic construct
  misc_feature 1..16: note = Description of Artificial Sequence: Syntheticoligonucleotide
  source 1..16: mol_type = other DNA
tcggcacctgtaggtc

SEQ ID NO: 908 - DNA, 16 bp, synthetic construct
  misc_feature 1..16: note = Description of Artificial Sequence: Syntheticoligonucleotide
  source 1..16: mol_type = other DNA
ctacaatacggcctcc

SEQ ID NO: 909 - DNA, 16 bp, synthetic construct
  misc_feature 1..16: note = Description of Artificial Sequence: Syntheticoligonucleotide
  source 1..16: mol_type = other DNA
gcactgcaagcccaca

SEQ ID NO: 910 - DNA, 16 bp, synthetic construct
  misc_feature 1..16: note = Description of Artificial Sequence: Syntheticoligonucleotide
  source 1..16: mol_type = other DNA
ggctgaggtgttacca

SEQ ID NO: 911 - DNA, 16 bp, synthetic construct
  misc_feature 1..16: note = Description of Artificial Sequence: Syntheticoligonucleotide
  source 1..16: mol_type = other DNA
gtaaagctctgtggtt

SEQ ID NO: 912 - DNA, 16 bp, synthetic construct
  misc_feature 1..16: note = Description of Artificial Sequence: Syntheticoligonucleotide
  source 1..16: mol_type = other DNA
aagcttaaagacggcc

SEQ ID NO: 913 - DNA, 16 bp, synthetic construct
  misc_feature 1..16: note = Description of Artificial Sequence: Syntheticoligonucleotide
  source 1..16: mol_type = other DNA
actacttattgggatg

SEQ ID NO: 914 - DNA, 16 bp, synthetic construct
  misc_feature 1..16: note = Description of Artificial Sequence: Syntheticoligonucleotide
  source 1..16: mol_type = other DNA
ggagtagcagggcaaa

SEQ ID NO: 915 - DNA, 16 bp, synthetic construct
  misc_feature 1..16: note = Description of Artificial Sequence: Syntheticoligonucleotide
  source 1..16: mol_type = other DNA
gctaagggttgtgtgt

SEQ ID NO: 916 - DNA, 16 bp, synthetic construct
  misc_feature 1..16: note = Description of Artificial Sequence: Syntheticoligonucleotide
  source 1..16: mol_type = other DNA
gcagtgcctaagtagg

SEQ ID NO: 917 - DNA, 16 bp, synthetic construct
  misc_feature 1..16: note = Description of Artificial Sequence: Syntheticoligonucleotide
  source 1..16: mol_type = other DNA
atgaggcctcagcctg

SEQ ID NO: 918 - DNA, 16 bp, synthetic construct
  misc_feature 1..16: note = Description of Artificial Sequence: Syntheticoligonucleotide
  source 1..16: mol_type = other DNA
tcagagggtttgtaag

SEQ ID NO: 919 - DNA, 16 bp, synthetic construct
  misc_feature 1..16: note = Description of Artificial Sequence: Syntheticoligonucleotide
  source 1..16: mol_type = other DNA
ttcgcatcatgagaaa

SEQ ID NO: 920 - DNA, 16 bp, synthetic construct
  misc_feature 1..16: note = Description of Artificial Sequence: Syntheticoligonucleotide
  source 1..16: mol_type = other DNA
ggcttaaacttcccac

SEQ ID NO: 921 - DNA, 16 bp, synthetic construct
  misc_feature 1..16: note = Description of Artificial Sequence: Syntheticoligonucleotide
  source 1..16: mol_type = other DNA
agcatggagctccttt

SEQ ID NO: 922 - DNA, 16 bp, synthetic construct
  misc_feature 1..16: note = Description of Artificial Sequence: Syntheticoligonucleotide
  source 1..16: mol_type = other DNA
tgaggcatggccccaa

SEQ ID NO: 923 - DNA, 16 bp, synthetic construct
  misc_feature 1..16: note = Description of Artificial Sequence: Syntheticoligonucleotide
  source 1..16: mol_type = other DNA
attttccttggtcagg

SEQ ID NO: 924 - DNA, 16 bp, synthetic construct
  misc_feature 1..16: note = Description of Artificial Sequence: Syntheticoligonucleotide
  source 1..16: mol_type = other DNA
tctgatccctgctaag

SEQ ID NO: 925 - DNA, 16 bp, synthetic construct
  misc_feature 1..16: note = Description of Artificial Sequence: Syntheticoligonucleotide
  source 1..16: mol_type = other DNA
gttgaaaagaagcgga

SEQ ID NO: 926 - DNA, 16 bp, synthetic construct
  misc_feature 1..16: note = Description of Artificial Sequence: Syntheticoligonucleotide
  source 1..16: mol_type = other DNA
tctcaccgtcaacacc

SEQ ID NO: 927 - DNA, 16 bp, synthetic construct
  misc_feature 1..16: note = Description of Artificial Sequence: Syntheticoligonucleotide
  source 1..16: mol_type = other DNA
catgcaggacctccta

SEQ ID NO: 928 - DNA, 16 bp, synthetic construct
  misc_feature 1..16: note = Description of Artificial Sequence: Syntheticoligonucleotide
  source 1..16: mol_type = other DNA
tgggaatggaggaacc

SEQ ID NO: 929 - DNA, 16 bp, synthetic construct
  misc_feature 1..16: note = Description of Artificial Sequence: Syntheticoligonucleotide
  source 1..16: mol_type = other DNA
attttatgggtccagg

SEQ ID NO: 930 - DNA, 16 bp, synthetic construct
  misc_feature 1..16: note = Description of Artificial Sequence: Syntheticoligonucleotide
  source 1..16: mol_type = other DNA
aaggatcaaatgggtg

SEQ ID NO: 931 - DNA, 16 bp, synthetic construct
  misc_feature 1..16: note = Description of Artificial Sequence: Syntheticoligonucleotide
  source 1..16: mol_type = other DNA
acagagtcagcgatga

SEQ ID NO: 932 - DNA, 16 bp, synthetic construct
  misc_feature 1..16: note = Description of Artificial Sequence: Syntheticoligonucleotide
  source 1..16: mol_type = other DNA
ttgaattatcgagtat

SEQ ID NO: 933 - DNA, 16 bp, synthetic construct
  misc_feature 1..16: note = Description of Artificial Sequence: Syntheticoligonucleotide
  source 1..16: mol_type = other DNA
ggtaagggatcaggac

SEQ ID NO: 934 - DNA, 16 bp, synthetic construct
  misc_feature 1..16: note = Description of Artificial Sequence: Syntheticoligonucleotide
  source 1..16: mol_type = other DNA
atccaaatttttttcg

SEQ ID NO: 935 - DNA, 16 bp, synthetic construct
  misc_feature 1..16: note = Description of Artificial Sequence: Syntheticoligonucleotide
  source 1..16: mol_type = other DNA
ttggtgaagtggactg

SEQ ID NO: 936 - DNA, 16 bp, synthetic construct
  misc_feature 1..16: note = Description of Artificial Sequence: Syntheticoligonucleotide
  source 1..16: mol_type = other DNA
atctcggccctggaag

SEQ ID NO: 937 - DNA, 16 bp, synthetic construct
  misc_feature 1..16: note = Description of Artificial Sequence: Syntheticoligonucleotide
  source 1..16: mol_type = other DNA
tcctggaggagtgcct

SEQ ID NO: 938 - DNA, 16 bp, synthetic construct
  misc_feature 1..16: note = Description of Artificial Sequence: Syntheticoligonucleotide
  source 1..16: mol_type = other DNA
gttgatcccaggtggg

SEQ ID NO: 939 - DNA, 16 bp, synthetic construct
  misc_feature 1..16: note = Description of Artificial Sequence: Syntheticoligonucleotide
  source 1..16: mol_type = other DNA
tcgaagaccttctcac

SEQ ID NO: 940 - DNA, 16 bp, synthetic construct
  misc_feature 1..16: note = Description of Artificial Sequence: Syntheticoligonucleotide
  source 1..16: mol_type = other DNA
cctgcatggcactcag

SEQ ID NO: 941 - DNA, 16 bp, synthetic construct
  misc_feature 1..16: note = Description of Artificial Sequence: Syntheticoligonucleotide
  source 1..16: mol_type = other DNA
cctccggacagcaaac

SEQ ID NO: 942 - DNA, 16 bp, synthetic construct
  misc_feature 1..16: note = Description of Artificial Sequence: Syntheticoligonucleotide
  source 1..16: mol_type = other DNA
attgagtgtccgctgc

SEQ ID NO: 943 - DNA, 16 bp, synthetic construct
  misc_feature 1..16: note = Description of Artificial Sequence: Syntheticoligonucleotide
  source 1..16: mol_type = other DNA
agggttggaacacctg

SEQ ID NO: 944 - DNA, 16 bp, synthetic construct
  misc_feature 1..16: note = Description of Artificial Sequence: Syntheticoligonucleotide
  source 1..16: mol_type = other DNA
tggctgcagggctcga

SEQ ID NO: 945 - DNA, 16 bp, synthetic construct
  misc_feature 1..16: note = Description of Artificial Sequence: Syntheticoligonucleotide
  source 1..16: mol_type = other DNA
agtgtactgaggcagg

SEQ ID NO: 946 - DNA, 16 bp, synthetic construct
  misc_feature 1..16: note = Description of Artificial Sequence: Syntheticoligonucleotide
  source 1..16: mol_type = other DNA
ctgagggtactgacgc

SEQ ID NO: 947 - DNA, 16 bp, synthetic construct
  misc_feature 1..16: note = Description of Artificial Sequence: Syntheticoligonucleotide
  source 1..16: mol_type = other DNA
gcatggatcagggctc

SEQ ID NO: 948 - DNA, 16 bp, synthetic construct
  misc_feature 1..16: note = Description of Artificial Sequence: Syntheticoligonucleotide
  source 1..16: mol_type = other DNA
ggcgaggatccttccc

SEQ ID NO: 949 - DNA, 16 bp, synthetic construct
  misc_feature 1..16: note = Description of Artificial Sequence: Syntheticoligonucleotide
  source 1..16: mol_type = other DNA
gcccactttgagctgc

SEQ ID NO: 950 - DNA, 16 bp, synthetic construct
  misc_feature 1..16: note = Description of Artificial Sequence: Syntheticoligonucleotide
  source 1..16: mol_type = other DNA
acactcaccttggtga

SEQ ID NO: 951 - DNA, 16 bp, synthetic construct
  misc_feature 1..16: note = Description of Artificial Sequence: Syntheticoligonucleotide
  source 1..16: mol_type = other DNA
aaagaccttacctggc

SEQ ID NO: 952 - DNA, 16 bp, synthetic construct
  misc_feature 1..16: note = Description of Artificial Sequence: Syntheticoligonucleotide
  source 1..16: mol_type = other DNA
gcatcaagagctaaga

SEQ ID NO: 953 - DNA, 16 bp, synthetic construct
  misc_feature 1..16: note = Description of Artificial Sequence: Syntheticoligonucleotide
  source 1..16: mol_type = other DNA
ggaaaggagatcgatg

SEQ ID NO: 954 - DNA, 16 bp, synthetic construct
  misc_feature 1..16: note = Description of Artificial Sequence: Syntheticoligonucleotide
  source 1..16: mol_type = other DNA
ggtgaacagaactgat

SEQ ID NO: 955 - DNA, 16 bp, synthetic construct
  misc_feature 1..16: note = Description of Artificial Sequence: Syntheticoligonucleotide
  source 1..16: mol_type = other DNA
caagggtctcctctaa

SEQ ID NO: 956 - DNA, 16 bp, synthetic construct
  misc_feature 1..16: note = Description of Artificial Sequence: Syntheticoligonucleotide
  source 1..16: mol_type = other DNA
ctgcagaatcgagctc

SEQ ID NO: 957 - DNA, 16 bp, synthetic construct
  misc_feature 1..16: note = Description of Artificial Sequence: Syntheticoligonucleotide
  source 1..16: mol_type = other DNA
gagaaacaaccggaat

SEQ ID NO: 958 - DNA, 16 bp, synthetic construct
  misc_feature 1..16: note = Description of Artificial Sequence: Syntheticoligonucleotide
  source 1..16: mol_type = other DNA
taagtagagggagcat

SEQ ID NO: 959 - DNA, 16 bp, synthetic construct
  misc_feature 1..16: note = Description of Artificial Sequence: Syntheticoligonucleotide
  source 1..16: mol_type = other DNA
atgaacaccctattag

SEQ ID NO: 960 - DNA, 16 bp, synthetic construct
  misc_feature 1..16: note = Description of Artificial Sequence: Syntheticoligonucleotide
  source 1..16: mol_type = other DNA
aacctatttgactgta

SEQ ID NO: 961 - DNA, 16 bp, synthetic construct
  misc_feature 1..16: note = Description of Artificial Sequence: Syntheticoligonucleotide
  source 1..16: mol_type = other DNA
cagtacccacactctt

SEQ ID NO: 962 - DNA, 16 bp, synthetic construct
  misc_feature 1..16: note = Description of Artificial Sequence: Syntheticoligonucleotide
  source 1..16: mol_type = other DNA
cctaatgctgatcttg

SEQ ID NO: 963 - DNA, 16 bp, synthetic construct
  misc_feature 1..16: note = Description of Artificial Sequence: Syntheticoligonucleotide
  source 1..16: mol_type = other DNA
gttattgagtgaatag

SEQ ID NO: 964 - DNA, 16 bp, synthetic construct
  misc_feature 1..16: note = Description of Artificial Sequence: Syntheticoligonucleotide
  source 1..16: mol_type = other DNA
gggtattgaattgtat

SEQ ID NO: 965 - DNA, 16 bp, synthetic construct
  misc_feature 1..16: note = Description of Artificial Sequence: Syntheticoligonucleotide
  source 1..16: mol_type = other DNA
caaagagcgagcaaga

SEQ ID NO: 966 - DNA, 16 bp, synthetic construct
  misc_feature 1..16: note = Description of Artificial Sequence: Syntheticoligonucleotide
  source 1..16: mol_type = other DNA
tggttaagtcattagg

SEQ ID NO: 967 - DNA, 16 bp, synthetic construct
  misc_feature 1..16: note = Description of Artificial Sequence: Syntheticoligonucleotide
  source 1..16: mol_type = other DNA
ctagagtcctgagatc

SEQ ID NO: 968 - DNA, 16 bp, synthetic construct
  misc_feature 1..16: note = Description of Artificial Sequence: Syntheticoligonucleotide
  source 1..16: mol_type = other DNA
ccacaatcaaggtttt

SEQ ID NO: 969 - DNA, 16 bp, synthetic construct
  misc_feature 1..16: note = Description of Artificial Sequence: Syntheticoligonucleotide
  source 1..16: mol_type = other DNA
atagggcctcttgcct

SEQ ID NO: 970 - DNA, 16 bp, synthetic construct
  misc_feature 1..16: note = Description of Artificial Sequence: Syntheticoligonucleotide
  source 1..16: mol_type = other DNA
caaatagtataacacc

SEQ ID NO: 971 - DNA, 16 bp, synthetic construct
  misc_feature 1..16: note = Description of Artificial Sequence: Syntheticoligonucleotide
  source 1..16: mol_type = other DNA
ccgagaactggctgcc

SEQ ID NO: 972 - DNA, 16 bp, synthetic construct
  misc_feature 1..16: note = Description of Artificial Sequence: Syntheticoligonucleotide
  source 1..16: mol_type = other DNA
gatttttccgccattg

SEQ ID NO: 973 - DNA, 16 bp, synthetic construct
  misc_feature 1..16: note = Description of Artificial Sequence: Syntheticoligonucleotide
  source 1..16: mol_type = other DNA
gaggacctagagggcc

SEQ ID NO: 974 - DNA, 16 bp, synthetic construct
  misc_feature 1..16: note = Description of Artificial Sequence: Syntheticoligonucleotide
  source 1..16: mol_type = other DNA
cctggacacttggcca

SEQ ID NO: 975 - DNA, 16 bp, synthetic construct
  misc_feature 1..16: note = Description of Artificial Sequence: Syntheticoligonucleotide
  source 1..16: mol_type = other DNA
ttagaacattactgcg

SEQ ID NO: 976 - DNA, 16 bp, synthetic construct
  misc_feature 1..16: note = Description of Artificial Sequence: Syntheticoligonucleotide
  source 1..16: mol_type = other DNA
taaactctctggtgtg

SEQ ID NO: 977 - DNA, 16 bp, synthetic construct
  misc_feature 1..16: note = Description of Artificial Sequence: Syntheticoligonucleotide
  source 1..16: mol_type = other DNA
cctataatcctggtct

SEQ ID NO: 978 - DNA, 16 bp, synthetic construct
  misc_feature 1..16: note = Description of Artificial Sequence: Syntheticoligonucleotide
  source 1..16: mol_type = other DNA
ccccatcagagttcac

SEQ ID NO: 979 - DNA, 16 bp, synthetic construct
  misc_feature 1..16: note = Description of Artificial Sequence: Syntheticoligonucleotide
  source 1..16: mol_type = other DNA
ctggatctcagggcaa

SEQ ID NO: 980 - DNA, 16 bp, synthetic construct
  misc_feature 1..16: note = Description of Artificial Sequence: Syntheticoligonucleotide
  source 1..16: mol_type = other DNA
gcagctggaaggaccg

SEQ ID NO: 981 - DNA, 16 bp, synthetic construct
  misc_feature 1..16: note = Description of Artificial Sequence: Syntheticoligonucleotide
  source 1..16: mol_type = other DNA
tgtaacagtcctggca

SEQ ID NO: 982 - DNA, 16 bp, synthetic construct
  misc_feature 1..16: note = Description of Artificial Sequence: Syntheticoligonucleotide
  source 1..16: mol_type = other DNA
ccacttgagagctgtt

SEQ ID NO: 983 - DNA, 16 bp, synthetic construct
  misc_feature 1..16: note = Description of Artificial Sequence: Syntheticoligonucleotide
  source 1..16: mol_type = other DNA
ctgggacatgtcccga

SEQ ID NO: 984 - DNA, 16 bp, synthetic construct
  misc_feature 1..16: note = Description of Artificial Sequence: Syntheticoligonucleotide
  source 1..16: mol_type = other DNA
gtaaaggtcggcacct

SEQ ID NO: 985 - DNA, 16 bp, synthetic construct
  misc_feature 1..16: note = Description of Artificial Sequence: Syntheticoligonucleotide
  source 1..16: mol_type = other DNA
acctacttggccccag

SEQ ID NO: 986 - DNA, 16 bp, synthetic construct
  misc_feature 1..16: note = Description of Artificial Sequence: Syntheticoligonucleotide
  source 1..16: mol_type = other DNA
tgagaggccatcctga

SEQ ID NO: 987 - DNA, 16 bp, synthetic construct
  misc_feature 1..16: note = Description of Artificial Sequence: Syntheticoligonucleotide
  source 1..16: mol_type = other DNA
agaatagcctacactg

SEQ ID NO: 988 - DNA, 16 bp, synthetic construct
  misc_feature 1..16: note = Description of Artificial Sequence: Syntheticoligonucleotide
  source 1..16: mol_type = other DNA
tttgactagctttgta

SEQ ID NO: 989 - DNA, 16 bp, synthetic construct
  misc_feature 1..16: note = Description of Artificial Sequence: Syntheticoligonucleotide
  source 1..16: mol_type = other DNA
cctcgaaaaccctgac

SEQ ID NO: 990 - DNA, 16 bp, synthetic construct
  misc_feature 1..16: note = Description of Artificial Sequence: Syntheticoligonucleotide
  source 1..16: mol_type = other DNA
gagtttagctcttgca

SEQ ID NO: 991 - DNA, 16 bp, synthetic construct
  misc_feature 1..16: note = Description of Artificial Sequence: Syntheticoligonucleotide
  source 1..16: mol_type = other DNA
atgttggcatgaggag

SEQ ID NO: 992 - DNA, 16 bp, synthetic construct
  misc_feature 1..16: note = Description of Artificial Sequence: Syntheticoligonucleotide
  source 1..16: mol_type = other DNA
gggacggcctgtgcaa

SEQ ID NO: 993 - DNA, 16 bp, synthetic construct
  misc_feature 1..16: note = Description of Artificial Sequence: Syntheticoligonucleotide
  source 1..16: mol_type = other DNA
cttaccctccaccgcc

SEQ ID NO: 994 - DNA, 16 bp, synthetic construct
  misc_feature 1..16: note = Description of Artificial Sequence: Syntheticoligonucleotide
  source 1..16: mol_type = other DNA
cacaaacatgaggcct

SEQ ID NO: 995 - DNA, 16 bp, synthetic construct
  misc_feature 1..16: note = Description of Artificial Sequence: Syntheticoligonucleotide
  source 1..16: mol_type = other DNA
ctcaggatcacagtgt

SEQ ID NO: 996 - DNA, 16 bp, synthetic construct
  misc_feature 1..16: note = Description of Artificial Sequence: Syntheticoligonucleotide
  source 1..16: mol_type = other DNA
cctaaacccccctggc

SEQ ID NO: 997 - DNA, 16 bp, synthetic construct
  misc_feature 1..16: note = Description of Artificial Sequence: Syntheticoligonucleotide
  source 1..16: mol_type = other DNA
acccagaggcttaaac

SEQ ID NO: 998 - DNA, 16 bp, synthetic construct
  misc_feature 1..16: note = Description of Artificial Sequence: Syntheticoligonucleotide
  source 1..16: mol_type = other DNA
gtgagcggatgcattt

SEQ ID NO: 999 - DNA, 16 bp, synthetic construct
  misc_feature 1..16: note = Description of Artificial Sequence: Syntheticoligonucleotide
  source 1..16: mol_type = other DNA
tatagtagctggagtc

SEQ ID NO: 1000 - DNA, 16 bp, synthetic construct
  misc_feature 1..16: note = Description of Artificial Sequence: Syntheticoligonucleotide
  source 1..16: mol_type = other DNA
accccgattttccttg

SEQ ID NO: 1001 - DNA, 16 bp, synthetic construct
  misc_feature 1..16: note = Description of Artificial Sequence: Syntheticoligonucleotide
  source 1..16: mol_type = other DNA
tgacagtcaaggtctc

SEQ ID NO: 1002 - DNA, 16 bp, synthetic construct
  misc_feature 1..16: note = Description of Artificial Sequence: Syntheticoligonucleotide
  source 1..16: mol_type = other DNA
aaaatagttctccccg

SEQ ID NO: 1003 - DNA, 16 bp, synthetic construct
  misc_feature 1..16: note = Description of Artificial Sequence: Syntheticoligonucleotide
  source 1..16: mol_type = other DNA
aggcctgagatctcac

SEQ ID NO: 1004 - DNA, 16 bp, synthetic construct
  misc_feature 1..16: note = Description of Artificial Sequence: Syntheticoligonucleotide
  source 1..16: mol_type = other DNA
tgaatcaagccccatg

SEQ ID NO: 1005 - DNA, 16 bp, synthetic construct
  misc_feature 1..16: note = Description of Artificial Sequence: Syntheticoligonucleotide
  source 1..16: mol_type = other DNA
ggatttgcggacaggt

SEQ ID NO: 1006 - DNA, 16 bp, synthetic construct
  misc_feature 1..16: note = Description of Artificial Sequence: Syntheticoligonucleotide
  source 1..16: mol_type = other DNA
cgtttagggcaaggtg

SEQ ID NO: 1007 - DNA, 16 bp, synthetic construct
  misc_feature 1..16: note = Description of Artificial Sequence: Syntheticoligonucleotide
  source 1..16: mol_type = other DNA
tgagatgaaggagttg

SEQ ID NO: 1008 - DNA, 16 bp, synthetic construct
  misc_feature 1..16: note = Description of Artificial Sequence: Syntheticoligonucleotide
  source 1..16: mol_type = other DNA
gaatgggattacagag

SEQ ID NO: 1009 - DNA, 16 bp, synthetic construct
  misc_feature 1..16: note = Description of Artificial Sequence: Syntheticoligonucleotide
  source 1..16: mol_type = other DNA
gctttaggtcagaagc

SEQ ID NO: 1010 - DNA, 16 bp, synthetic construct
  misc_feature 1..16: note = Description of Artificial Sequence: Syntheticoligonucleotide
  source 1..16: mol_type = other DNA
ggattaggtaagggat

SEQ ID NO: 1011 - DNA, 16 bp, synthetic construct
  misc_feature 1..16: note = Description of Artificial Sequence: Syntheticoligonucleotide
  source 1..16: mol_type = other DNA
cgcagacctctctctt

SEQ ID NO: 1012 - DNA, 16 bp, synthetic construct
  misc_feature 1..16: note = Description of Artificial Sequence: Syntheticoligonucleotide
  source 1..16: mol_type = other DNA
cttggtgaagtggact

SEQ ID NO: 1013 - DNA, 16 bp, synthetic construct
  misc_feature 1..16: note = Description of Artificial Sequence: Syntheticoligonucleotide
  source 1..16: mol_type = other DNA
gatctcggccctggaa

SEQ ID NO: 1014 - DNA, 16 bp, synthetic construct
  misc_feature 1..16: note = Description of Artificial Sequence: Syntheticoligonucleotide
  source 1..16: mol_type = other DNA
gtcctggaggagtgcc

SEQ ID NO: 1015 - DNA, 16 bp, synthetic construct
  misc_feature 1..16: note = Description of Artificial Sequence: Syntheticoligonucleotide
  source 1..16: mol_type = other DNA
gacacccattccaggc

SEQ ID NO: 1016 - DNA, 16 bp, synthetic construct
  misc_feature 1..16: note = Description of Artificial Sequence: Syntheticoligonucleotide
  source 1..16: mol_type = other DNA
ttcgaagaccttctca

SEQ ID NO: 1017 - DNA, 16 bp, synthetic construct
  misc_feature 1..16: note = Description of Artificial Sequence: Syntheticoligonucleotide
  source 1..16: mol_type = other DNA
gccttggtcagtgcca

SEQ ID NO: 1018 - DNA, 16 bp, synthetic construct
  misc_feature 1..16: note = Description of Artificial Sequence: Syntheticoligonucleotide
  source 1..16: mol_type = other DNA
gcctccggacagcaaa

SEQ ID NO: 1019 - DNA, 16 bp, synthetic construct
  misc_feature 1..16: note = Description of Artificial Sequence: Syntheticoligonucleotide
  source 1..16: mol_type = other DNA
tcattgagtgtccgct

SEQ ID NO: 1020 - DNA, 16 bp, synthetic construct
  misc_feature 1..16: note = Description of Artificial Sequence: Syntheticoligonucleotide
  source 1..16: mol_type = other DNA
tagggttggaacacct

SEQ ID NO: 1021 - DNA, 16 bp, synthetic construct
  misc_feature 1..16: note = Description of Artificial Sequence: Syntheticoligonucleotide
  source 1..16: mol_type = other DNA
ttggctgcagggctcg

SEQ ID NO: 1022 - DNA, 16 bp, synthetic construct
  misc_feature 1..16: note = Description of Artificial Sequence: Syntheticoligonucleotide
  source 1..16: mol_type = other DNA
gagtgtactgaggcag

SEQ ID NO: 1023 - DNA, 16 bp, synthetic construct
  misc_feature 1..16: note = Description of Artificial Sequence: Syntheticoligonucleotide
  source 1..16: mol_type = other DNA
cctgagggtactgacg

SEQ ID NO: 1024 - DNA, 16 bp, synthetic construct
  misc_feature 1..16: note = Description of Artificial Sequence: Syntheticoligonucleotide
  source 1..16: mol_type = other DNA
ggcatggatcagggct

SEQ ID NO: 1025 - DNA, 16 bp, synthetic construct
  misc_feature 1..16: note = Description of Artificial Sequence: Syntheticoligonucleotide
  source 1..16: mol_type = other DNA
gggcgaggatccttcc

SEQ ID NO: 1026 - DNA, 16 bp, synthetic construct
  misc_feature 1..16: note = Description of Artificial Sequence: Syntheticoligonucleotide
  source 1..16: mol_type = other DNA
tatgagcccagaccca

SEQ ID NO: 1027 - DNA, 16 bp, synthetic construct
  misc_feature 1..16: note = Description of Artificial Sequence: Syntheticoligonucleotide
  source 1..16: mol_type = other DNA
gacactcaccttggtg

SEQ ID NO: 1028 - DNA, 16 bp, synthetic construct
  misc_feature 1..16: note = Description of Artificial Sequence: Syntheticoligonucleotide
  source 1..16: mol_type = other DNA
taaagaccttacctgg

SEQ ID NO: 1029 - DNA, 16 bp, synthetic construct
  misc_feature 1..16: note = Description of Artificial Sequence: Syntheticoligonucleotide
  source 1..16: mol_type = other DNA
aggcatcaagagctaa

SEQ ID NO: 1030 - DNA, 16 bp, synthetic construct
  misc_feature 1..16: note = Description of Artificial Sequence: Syntheticoligonucleotide
  source 1..16: mol_type = other DNA
aggaaaggagatcgat

SEQ ID NO: 1031 - DNA, 16 bp, synthetic construct
  misc_feature 1..16: note = Description of Artificial Sequence: Syntheticoligonucleotide
  source 1..16: mol_type = other DNA
gggtgaacagaactga

SEQ ID NO: 1032 - DNA, 16 bp, synthetic construct
  misc_feature 1..16: note = Description of Artificial Sequence: Syntheticoligonucleotide
  source 1..16: mol_type = other DNA
ccaagggtctcctcta

SEQ ID NO: 1033 - DNA, 16 bp, synthetic construct
  misc_feature 1..16: note = Description of Artificial Sequence: Syntheticoligonucleotide
  source 1..16: mol_type = other DNA
cctgcagaatcgagct

SEQ ID NO: 1034 - DNA, 16 bp, synthetic construct
  misc_feature 1..16: note = Description of Artificial Sequence: Syntheticoligonucleotide
  source 1..16: mol_type = other DNA
cgagaaacaaccggaa

SEQ ID NO: 1035 - DNA, 16 bp, synthetic construct
  misc_feature 1..16: note = Description of Artificial Sequence: Syntheticoligonucleotide
  source 1..16: mol_type = other DNA
ttaagtagagggagca

SEQ ID NO: 1036 - DNA, 16 bp, synthetic construct
  misc_feature 1..16: note = Description of Artificial Sequence: Syntheticoligonucleotide
  source 1..16: mol_type = other DNA
gatgaacaccctatta

SEQ ID NO: 1037 - DNA, 16 bp, synthetic construct
  misc_feature 1..16: note = Description of Artificial Sequence: Syntheticoligonucleotide
  source 1..16: mol_type = other DNA
ctaacctatttgactg

SEQ ID NO: 1038 - DNA, 16 bp, synthetic construct
  misc_feature 1..16: note = Description of Artificial Sequence: Syntheticoligonucleotide
  source 1..16: mol_type = other DNA
ccagtacccacactct

SEQ ID NO: 1039 - DNA, 16 bp, synthetic construct
  misc_feature 1..16: note = Description of Artificial Sequence: Syntheticoligonucleotide
  source 1..16: mol_type = other DNA
acctaatgctgatctt

SEQ ID NO: 1040 - DNA, 16 bp, synthetic construct
  misc_feature 1..16: note = Description of Artificial Sequence: Syntheticoligonucleotide
  source 1..16: mol_type = other DNA
gataaagttattgagt

SEQ ID NO: 1041 - DNA, 16 bp, synthetic construct
  misc_feature 1..16: note = Description of Artificial Sequence: Syntheticoligonucleotide
  source 1..16: mol_type = other DNA
tgggtattgaattgta

SEQ ID NO: 1042 - DNA, 16 bp, synthetic construct
  misc_feature 1..16: note = Description of Artificial Sequence: Syntheticoligonucleotide
  source 1..16: mol_type = other DNA
acaaagagcgagcaag

SEQ ID NO: 1043 - DNA, 16 bp, synthetic construct
  misc_feature 1..16: note = Description of Artificial Sequence: Syntheticoligonucleotide
  source 1..16: mol_type = other DNA
ctggttaagtcattag

SEQ ID NO: 1044 - DNA, 16 bp, synthetic construct
  misc_feature 1..16: note = Description of Artificial Sequence: Syntheticoligonucleotide
  source 1..16: mol_type = other DNA
acctagagtcctgaga

SEQ ID NO: 1045 - DNA, 16 bp, synthetic construct
  misc_feature 1..16: note = Description of Artificial Sequence: Syntheticoligonucleotide
  source 1..16: mol_type = other DNA
ccccacaatcaaggtt

SEQ ID NO: 1046 - DNA, 16 bp, synthetic construct
  misc_feature 1..16: note = Description of Artificial Sequence: Syntheticoligonucleotide
  source 1..16: mol_type = other DNA
tcatagggcctcttgc

SEQ ID NO: 1047 - DNA, 16 bp, synthetic construct
  misc_feature 1..16: note = Description of Artificial Sequence: Syntheticoligonucleotide
  source 1..16: mol_type = other DNA
cttcaaatagtataac

SEQ ID NO: 1048 - DNA, 16 bp, synthetic construct
  misc_feature 1..16: note = Description of Artificial Sequence: Syntheticoligonucleotide
  source 1..16: mol_type = other DNA
tccgagaactggctgc

SEQ ID NO: 1049 - DNA, 16 bp, synthetic construct
  misc_feature 1..16: note = Description of Artificial Sequence: Syntheticoligonucleotide
  source 1..16: mol_type = other DNA
agatttttccgccatt

SEQ ID NO: 1050 - DNA, 16 bp, synthetic construct
  misc_feature 1..16: note = Description of Artificial Sequence: Syntheticoligonucleotide
  source 1..16: mol_type = other DNA
agaggacctagagggc

SEQ ID NO: 1051 - DNA, 16 bp, synthetic construct
  misc_feature 1..16: note = Description of Artificial Sequence: Syntheticoligonucleotide
  source 1..16: mol_type = other DNA
gcctggacacttggcc

SEQ ID NO: 1052 - DNA, 16 bp, synthetic construct
  misc_feature 1..16: note = Description of Artificial Sequence: Syntheticoligonucleotide
  source 1..16: mol_type = other DNA
cttagaacattactgc

SEQ ID NO: 1053 - DNA, 16 bp, synthetic construct
  misc_feature 1..16: note = Description of Artificial Sequence: Syntheticoligonucleotide
  source 1..16: mol_type = other DNA
taggaagtgtttccgt

SEQ ID NO: 1054 - DNA, 16 bp, synthetic construct
  misc_feature 1..16: note = Description of Artificial Sequence: Syntheticoligonucleotide
  source 1..16: mol_type = other DNA
tcctataatcctggtc

SEQ ID NO: 1055 - DNA, 16 bp, synthetic construct
  misc_feature 1..16: note = Description of Artificial Sequence: Syntheticoligonucleotide
  source 1..16: mol_type = other DNA
gtagaagcttctctac

SEQ ID NO: 1056 - DNA, 16 bp, synthetic construct
  misc_feature 1..16: note = Description of Artificial Sequence: Syntheticoligonucleotide
  source 1..16: mol_type = other DNA
ctggcattaaatatgt

SEQ ID NO: 1057 - DNA, 16 bp, synthetic construct
  misc_feature 1..16: note = Description of Artificial Sequence: Syntheticoligonucleotide
  source 1..16: mol_type = other DNA
tttagcttgagcagct

SEQ ID NO: 1058 - DNA, 16 bp, synthetic construct
  misc_feature 1..16: note = Description of Artificial Sequence: Syntheticoligonucleotide
  source 1..16: mol_type = other DNA
ttgtaacagtcctggc

SEQ ID NO: 1059 - DNA, 16 bp, synthetic construct
  misc_feature 1..16: note = Description of Artificial Sequence: Syntheticoligonucleotide
  source 1..16: mol_type = other DNA
tccacttgagagctgt

SEQ ID NO: 1060 - DNA, 16 bp, synthetic construct
  misc_feature 1..16: note = Description of Artificial Sequence: Syntheticoligonucleotide
  source 1..16: mol_type = other DNA
gctgggacatgtcccg

SEQ ID NO: 1061 - DNA, 16 bp, synthetic construct
  misc_feature 1..16: note = Description of Artificial Sequence: Syntheticoligonucleotide
  source 1..16: mol_type = other DNA
agtaaaggtcggcacc

SEQ ID NO: 1062 - DNA, 16 bp, synthetic construct
  misc_feature 1..16: note = Description of Artificial Sequence: Syntheticoligonucleotide
  source 1..16: mol_type = other DNA
cctcacctacttggcc

SEQ ID NO: 1063 - DNA, 16 bp, synthetic construct
  misc_feature 1..16: note = Description of Artificial Sequence: Syntheticoligonucleotide
  source 1..16: mol_type = other DNA
gtgagaggccatcctg

SEQ ID NO: 1064 - DNA, 16 bp, synthetic construct
  misc_feature 1..16: note = Description of Artificial Sequence: Syntheticoligonucleotide
  source 1..16: mol_type = other DNA
cagaatagcctacact

SEQ ID NO: 1065 - DNA, 16 bp, synthetic construct
  misc_feature 1..16: note = Description of Artificial Sequence: Syntheticoligonucleotide
  source 1..16: mol_type = other DNA
attttgactagctttg

SEQ ID NO: 1066 - DNA, 16 bp, synthetic construct
  misc_feature 1..16: note = Description of Artificial Sequence: Syntheticoligonucleotide
  source 1..16: mol_type = other DNA
gcctcgaaaaccctga

SEQ ID NO: 1067 - DNA, 16 bp, synthetic construct
  misc_feature 1..16: note = Description of Artificial Sequence: Syntheticoligonucleotide
  source 1..16: mol_type = other DNA
tctcagagtttagctc

SEQ ID NO: 1068 - DNA, 16 bp, synthetic construct
  misc_feature 1..16: note = Description of Artificial Sequence: Syntheticoligonucleotide
  source 1..16: mol_type = other DNA
catgttggcatgagga

SEQ ID NO: 1069 - DNA, 16 bp, synthetic construct
  misc_feature 1..16: note = Description of Artificial Sequence: Syntheticoligonucleotide
  source 1..16: mol_type = other DNA
gagggacggcctgtgc

SEQ ID NO: 1070 - DNA, 16 bp, synthetic construct
  misc_feature 1..16: note = Description of Artificial Sequence: Syntheticoligonucleotide
  source 1..16: mol_type = other DNA
ccttaccctccaccgc

SEQ ID NO: 1071 - DNA, 16 bp, synthetic construct
  misc_feature 1..16: note = Description of Artificial Sequence: Syntheticoligonucleotide
  source 1..16: mol_type = other DNA
gcacaaacatgaggcc

SEQ ID NO: 1072 - DNA, 16 bp, synthetic construct
  misc_feature 1..16: note = Description of Artificial Sequence: Syntheticoligonucleotide
  source 1..16: mol_type = other DNA
actcaggatcacagtg

SEQ ID NO: 1073 - DNA, 16 bp, synthetic construct
  misc_feature 1..16: note = Description of Artificial Sequence: Syntheticoligonucleotide
  source 1..16: mol_type = other DNA
acctaaacccccctgg

SEQ ID NO: 1074 - DNA, 16 bp, synthetic construct
  misc_feature 1..16: note = Description of Artificial Sequence: Syntheticoligonucleotide
  source 1..16: mol_type = other DNA
gtgacccagaggctta

SEQ ID NO: 1075 - DNA, 16 bp, synthetic construct
  misc_feature 1..16: note = Description of Artificial Sequence: Syntheticoligonucleotide
  source 1..16: mol_type = other DNA
tgtgagcggatgcatt

SEQ ID NO: 1076 - DNA, 16 bp, synthetic construct
  misc_feature 1..16: note = Description of Artificial Sequence: Syntheticoligonucleotide
  source 1..16: mol_type = other DNA
atatagtagctggagt

SEQ ID NO: 1077 - DNA, 16 bp, synthetic construct
  misc_feature 1..16: note = Description of Artificial Sequence: Syntheticoligonucleotide
  source 1..16: mol_type = other DNA
caccccgattttcctt

SEQ ID NO: 1078 - DNA, 16 bp, synthetic construct
  misc_feature 1..16: note = Description of Artificial Sequence: Syntheticoligonucleotide
  source 1..16: mol_type = other DNA
gatgacagtcaaggtc

SEQ ID NO: 1079 - DNA, 16 bp, synthetic construct
  misc_feature 1..16: note = Description of Artificial Sequence: Syntheticoligonucleotide
  source 1..16: mol_type = other DNA
caaaatagttctcccc

SEQ ID NO: 1080 - DNA, 16 bp, synthetic construct
  misc_feature 1..16: note = Description of Artificial Sequence: Syntheticoligonucleotide
  source 1..16: mol_type = other DNA
tacaggcctgagatct

SEQ ID NO: 1081 - DNA, 16 bp, synthetic construct
  misc_feature 1..16: note = Description of Artificial Sequence: Syntheticoligonucleotide
  source 1..16: mol_type = other DNA
gatgaatcaagcccca

SEQ ID NO: 1082 - DNA, 16 bp, synthetic construct
  misc_feature 1..16: note = Description of Artificial Sequence: Syntheticoligonucleotide
  source 1..16: mol_type = other DNA
gtggtttaggtttgga

SEQ ID NO: 1083 - DNA, 16 bp, synthetic construct
  misc_feature 1..16: note = Description of Artificial Sequence: Syntheticoligonucleotide
  source 1..16: mol_type = other DNA
tagagtaagagctggg

SEQ ID NO: 1084 - DNA, 16 bp, synthetic construct
  misc_feature 1..16: note = Description of Artificial Sequence: Syntheticoligonucleotide
  source 1..16: mol_type = other DNA
tctgagaaggcattgg

SEQ ID NO: 1085 - DNA, 16 bp, synthetic construct
  misc_feature 1..16: note = Description of Artificial Sequence: Syntheticoligonucleotide
  source 1..16: mol_type = other DNA
cagtttggattcagga

SEQ ID NO: 1086 - DNA, 16 bp, synthetic construct
  misc_feature 1..16: note = Description of Artificial Sequence: Syntheticoligonucleotide
  source 1..16: mol_type = other DNA
ggctttaggtcagaag

SEQ ID NO: 1087 - DNA, 16 bp, synthetic construct
  misc_feature 1..16: note = Description of Artificial Sequence: Syntheticoligonucleotide
  source 1..16: mol_type = other DNA
ctgggattaggtaagg

SEQ ID NO: 1088 - DNA, 16 bp, synthetic construct
  misc_feature 1..16: note = Description of Artificial Sequence: Syntheticoligonucleotide
  source 1..16: mol_type = other DNA
gccgcagacctctctc

SEQ ID NO: 1089 - DNA, 16 bp, synthetic construct
  misc_feature 1..16: note = Description of Artificial Sequence: Syntheticoligonucleotide
  source 1..16: mol_type = other DNA
ggcttggtgaagtgga

SEQ ID NO: 1090 - DNA, 16 bp, synthetic construct
  misc_feature 1..16: note = Description of Artificial Sequence: Syntheticoligonucleotide
  source 1..16: mol_type = other DNA
agatctcggccctgga

SEQ ID NO: 1091 - DNA, 16 bp, synthetic construct
  misc_feature 1..16: note = Description of Artificial Sequence: Syntheticoligonucleotide
  source 1..16: mol_type = other DNA
gcatgaaatgtggcct

SEQ ID NO: 1092 - DNA, 16 bp, synthetic construct
  misc_feature 1..16: note = Description of Artificial Sequence: Syntheticoligonucleotide
  source 1..16: mol_type = other DNA
ctggacacccattcca

SEQ ID NO: 1093 - DNA, 16 bp, synthetic construct
  misc_feature 1..16: note = Description of Artificial Sequence: Syntheticoligonucleotide
  source 1..16: mol_type = other DNA
cttcgaagaccttctc

SEQ ID NO: 1094 - DNA, 16 bp, synthetic construct
  misc_feature 1..16: note = Description of Artificial Sequence: Syntheticoligonucleotide
  source 1..16: mol_type = other DNA
agccttggtcagtgcc

SEQ ID NO: 1095 - DNA, 16 bp, synthetic construct
  misc_feature 1..16: note = Description of Artificial Sequence: Syntheticoligonucleotide
  source 1..16: mol_type = other DNA
cacaggtgcctccgga

SEQ ID NO: 1096 - DNA, 16 bp, synthetic construct
  misc_feature 1..16: note = Description of Artificial Sequence: Syntheticoligonucleotide
  source 1..16: mol_type = other DNA
ctcattgagtgtccgc

SEQ ID NO: 1097 - DNA, 16 bp, synthetic construct
  misc_feature 1..16: note = Description of Artificial Sequence: Syntheticoligonucleotide
  source 1..16: mol_type = other DNA
gtagggttggaacacc

SEQ ID NO: 1098 - DNA, 16 bp, synthetic construct
  misc_feature 1..16: note = Description of Artificial Sequence: Syntheticoligonucleotide
  source 1..16: mol_type = other DNA
tttggctgcagggctc

SEQ ID NO: 1099 - DNA, 16 bp, synthetic construct
  misc_feature 1..16: note = Description of Artificial Sequence: Syntheticoligonucleotide
  source 1..16: mol_type = other DNA
tgagtgtactgaggca

SEQ ID NO: 1100 - DNA, 16 bp, synthetic construct
  misc_feature 1..16: note = Description of Artificial Sequence: Syntheticoligonucleotide
  source 1..16: mol_type = other DNA
tcctgagggtactgac

SEQ ID NO: 1101 - DNA, 16 bp, synthetic construct
  misc_feature 1..16: note = Description of Artificial Sequence: Syntheticoligonucleotide
  source 1..16: mol_type = other DNA
gaggcatggatcaggg

SEQ ID NO: 1102 - DNA, 16 bp, synthetic construct
  misc_feature 1..16: note = Description of Artificial Sequence: Syntheticoligonucleotide
  source 1..16: mol_type = other DNA
agggcgaggatccttc

SEQ ID NO: 1103 - DNA, 16 bp, synthetic construct
  misc_feature 1..16: note = Description of Artificial Sequence: Syntheticoligonucleotide
  source 1..16: mol_type = other DNA
cctatgagcccagacc

SEQ ID NO: 1104 - DNA, 16 bp, synthetic construct
  misc_feature 1..16: note = Description of Artificial Sequence: Syntheticoligonucleotide
  source 1..16: mol_type = other DNA
ggacactcaccttggt

SEQ ID NO: 1105 - DNA, 16 bp, synthetic construct
  misc_feature 1..16: note = Description of Artificial Sequence: Syntheticoligonucleotide
  source 1..16: mol_type = other DNA
ttaaagaccttacctg

SEQ ID NO: 1106 - DNA, 16 bp, synthetic construct
  misc_feature 1..16: note = Description of Artificial Sequence: Syntheticoligonucleotide
  source 1..16: mol_type = other DNA
gaggcatcaagagcta

SEQ ID NO: 1107 - DNA, 16 bp, synthetic construct
  misc_feature 1..16: note = Description of Artificial Sequence: Syntheticoligonucleotide
  source 1..16: mol_type = other DNA
ggaggaaaggagatcg

SEQ ID NO: 1108 - DNA, 16 bp, synthetic construct
  misc_feature 1..16: note = Description of Artificial Sequence: Syntheticoligonucleotide
  source 1..16: mol_type = other DNA
ctagggtgaacagaac

SEQ ID NO: 1109 - DNA, 16 bp, synthetic construct
  misc_feature 1..16: note = Description of Artificial Sequence: Syntheticoligonucleotide
  source 1..16: mol_type = other DNA
cccgccccaagggtct

SEQ ID NO: 1110 - DNA, 16 bp, synthetic construct
  misc_feature 1..16: note = Description of Artificial Sequence: Syntheticoligonucleotide
  source 1..16: mol_type = other DNA
gctaagcctgcagaat

SEQ ID NO: 1111 - DNA, 16 bp, synthetic construct
  misc_feature 1..16: note = Description of Artificial Sequence: Syntheticoligonucleotide
  source 1..16: mol_type = other DNA
acgagaaacaaccgga

SEQ ID NO: 1112 - DNA, 16 bp, synthetic construct
  misc_feature 1..16: note = Description of Artificial Sequence: Syntheticoligonucleotide
  source 1..16: mol_type = other DNA
tagggttagcttaagt

SEQ ID NO: 1113 - DNA, 16 bp, synthetic construct
  misc_feature 1..16: note = Description of Artificial Sequence: Syntheticoligonucleotide
  source 1..16: mol_type = other DNA
agatgaacaccctatt

SEQ ID NO: 1114 - DNA, 16 bp, synthetic construct
  misc_feature 1..16: note = Description of Artificial Sequence: Syntheticoligonucleotide
  source 1..16: mol_type = other DNA
actaacctatttgact

SEQ ID NO: 1115 - DNA, 16 bp, synthetic construct
  misc_feature 1..16: note = Description of Artificial Sequence: Syntheticoligonucleotide
  source 1..16: mol_type = other DNA
tccagtacccacactc

SEQ ID NO: 1116 - DNA, 16 bp, synthetic construct
  misc_feature 1..16: note = Description of Artificial Sequence: Syntheticoligonucleotide
  source 1..16: mol_type = other DNA
cacctaatgctgatct

SEQ ID NO: 1117 - DNA, 16 bp, synthetic construct
  misc_feature 1..16: note = Description of Artificial Sequence: Syntheticoligonucleotide
  source 1..16: mol_type = other DNA
taattagggagaagat

SEQ ID NO: 1118 - DNA, 16 bp, synthetic construct
  misc_feature 1..16: note = Description of Artificial Sequence: Syntheticoligonucleotide
  source 1..16: mol_type = other DNA
ctgggtattgaattgt

SEQ ID NO: 1119 - DNA, 16 bp, synthetic construct
  misc_feature 1..16: note = Description of Artificial Sequence: Syntheticoligonucleotide
  source 1..16: mol_type = other DNA
cacaaagagcgagcaa

SEQ ID NO: 1120 - DNA, 16 bp, synthetic construct
  misc_feature 1..16: note = Description of Artificial Sequence: Syntheticoligonucleotide
  source 1..16: mol_type = other DNA
tctggttaagtcatta

SEQ ID NO: 1121 - DNA, 16 bp, synthetic construct
  misc_feature 1..16: note = Description of Artificial Sequence: Syntheticoligonucleotide
  source 1..16: mol_type = other DNA
cacctagagtcctgag

SEQ ID NO: 1122 - DNA, 16 bp, synthetic construct
  misc_feature 1..16: note = Description of Artificial Sequence: Syntheticoligonucleotide
  source 1..16: mol_type = other DNA
catcatcagactctct

SEQ ID NO: 1123 - DNA, 16 bp, synthetic construct
  misc_feature 1..16: note = Description of Artificial Sequence: Syntheticoligonucleotide
  source 1..16: mol_type = other DNA
ttcatagggcctcttg

SEQ ID NO: 1124 - DNA, 16 bp, synthetic construct
  misc_feature 1..16: note = Description of Artificial Sequence: Syntheticoligonucleotide
  source 1..16: mol_type = other DNA
atactgggacccctgg

SEQ ID NO: 1125 - DNA, 16 bp, synthetic construct
  misc_feature 1..16: note = Description of Artificial Sequence: Syntheticoligonucleotide
  source 1..16: mol_type = other DNA
ttccgagaactggctg

SEQ ID NO: 1126 - DNA, 16 bp, synthetic construct
  misc_feature 1..16: note = Description of Artificial Sequence: Syntheticoligonucleotide
  source 1..16: mol_type = other DNA
cagatttttccgccat

SEQ ID NO: 1127 - DNA, 16 bp, synthetic construct
  misc_feature 1..16: note = Description of Artificial Sequence: Syntheticoligonucleotide
  source 1..16: mol_type = other DNA
gtagaggacctagagg

SEQ ID NO: 1128 - DNA, 16 bp, synthetic construct
  misc_feature 1..16: note = Description of Artificial Sequence: Syntheticoligonucleotide
  source 1..16: mol_type = other DNA
ggtcacttctgaagct

SEQ ID NO: 1129 - DNA, 16 bp, synthetic construct
  misc_feature 1..16: note = Description of Artificial Sequence: Syntheticoligonucleotide
  source 1..16: mol_type = other DNA
ggcttagaacattact

SEQ ID NO: 1130 - DNA, 16 bp, synthetic construct
  misc_feature 1..16: note = Description of Artificial Sequence: Syntheticoligonucleotide
  source 1..16: mol_type = other DNA
ttaggaagtgtttccg

SEQ ID NO: 1131 - DNA, 16 bp, synthetic construct
  misc_feature 1..16: note = Description of Artificial Sequence: Syntheticoligonucleotide
  source 1..16: mol_type = other DNA
atcctataatcctggt

SEQ ID NO: 1132 - DNA, 16 bp, synthetic construct
  misc_feature 1..16: note = Description of Artificial Sequence: Syntheticoligonucleotide
  source 1..16: mol_type = other DNA
cctgtagaagcttctc

SEQ ID NO: 1133 - DNA, 16 bp, synthetic construct
  misc_feature 1..16: note = Description of Artificial Sequence: Syntheticoligonucleotide
  source 1..16: mol_type = other DNA
gaagagtctggcatta

SEQ ID NO: 1134 - DNA, 16 bp, synthetic construct
  misc_feature 1..16: note = Description of Artificial Sequence: Syntheticoligonucleotide
  source 1..16: mol_type = other DNA
ttttagcttgagcagc

SEQ ID NO: 1135 - DNA, 16 bp, synthetic construct
  misc_feature 1..16: note = Description of Artificial Sequence: Syntheticoligonucleotide
  source 1..16: mol_type = other DNA
attgtaacagtcctgg

SEQ ID NO: 1136 - DNA, 16 bp, synthetic construct
  misc_feature 1..16: note = Description of Artificial Sequence: Syntheticoligonucleotide
  source 1..16: mol_type = other DNA
ctccacttgagagctg

SEQ ID NO: 1137 - DNA, 16 bp, synthetic construct
  misc_feature 1..16: note = Description of Artificial Sequence: Syntheticoligonucleotide
  source 1..16: mol_type = other DNA
ggctgggacatgtccc

SEQ ID NO: 1138 - DNA, 16 bp, synthetic construct
  misc_feature 1..16: note = Description of Artificial Sequence: Syntheticoligonucleotide
  source 1..16: mol_type = other DNA
cagtaaaggtcggcac

SEQ ID NO: 1139 - DNA, 16 bp, synthetic construct
  misc_feature 1..16: note = Description of Artificial Sequence: Syntheticoligonucleotide
  source 1..16: mol_type = other DNA
tcgagtaactttttaa

SEQ ID NO: 1140 - DNA, 16 bp, synthetic construct
  misc_feature 1..16: note = Description of Artificial Sequence: Syntheticoligonucleotide
  source 1..16: mol_type = other DNA
ggtgagaggccatcct

SEQ ID NO: 1141 - DNA, 16 bp, synthetic construct
  misc_feature 1..16: note = Description of Artificial Sequence: Syntheticoligonucleotide
  source 1..16: mol_type = other DNA
tcagaatagcctacac

SEQ ID NO: 1142 - DNA, 16 bp, synthetic construct
  misc_feature 1..16: note = Description of Artificial Sequence: Syntheticoligonucleotide
  source 1..16: mol_type = other DNA
acattttgactagctt

SEQ ID NO: 1143 - DNA, 16 bp, synthetic construct
  misc_feature 1..16: note = Description of Artificial Sequence: Syntheticoligonucleotide
  source 1..16: mol_type = other DNA
agcctcgaaaaccctg

SEQ ID NO: 1144 - DNA, 16 bp, synthetic construct
  misc_feature 1..16: note = Description of Artificial Sequence: Syntheticoligonucleotide
  source 1..16: mol_type = other DNA
gaacccacagtctcag

SEQ ID NO: 1145 - DNA, 16 bp, synthetic construct
  misc_feature 1..16: note = Description of Artificial Sequence: Syntheticoligonucleotide
  source 1..16: mol_type = other DNA
aataaggctggcatgt

SEQ ID NO: 1146 - DNA, 16 bp, synthetic construct
  misc_feature 1..16: note = Description of Artificial Sequence: Syntheticoligonucleotide
  source 1..16: mol_type = other DNA
gtggagggacggcctg

SEQ ID NO: 1147 - DNA, 16 bp, synthetic construct
  misc_feature 1..16: note = Description of Artificial Sequence: Syntheticoligonucleotide
  source 1..16: mol_type = other DNA
tatccctatcccttac

SEQ ID NO: 1148 - DNA, 16 bp, synthetic construct
  misc_feature 1..16: note = Description of Artificial Sequence: Syntheticoligonucleotide
  source 1..16: mol_type = other DNA
ggcacaaacatgaggc

SEQ ID NO: 1149 - DNA, 16 bp, synthetic construct
  misc_feature 1..16: note = Description of Artificial Sequence: Syntheticoligonucleotide
  source 1..16: mol_type = other DNA
acaactcaggatcaca

SEQ ID NO: 1150 - DNA, 16 bp, synthetic construct
  misc_feature 1..16: note = Description of Artificial Sequence: Syntheticoligonucleotide
  source 1..16: mol_type = other DNA
cacctaaacccccctg

SEQ ID NO: 1151 - DNA, 16 bp, synthetic construct
  misc_feature 1..16: note = Description of Artificial Sequence: Syntheticoligonucleotide
  source 1..16: mol_type = other DNA
gtcggatgatgcctgg

SEQ ID NO: 1152 - DNA, 16 bp, synthetic construct
  misc_feature 1..16: note = Description of Artificial Sequence: Syntheticoligonucleotide
  source 1..16: mol_type = other DNA
ttgtgagcggatgcat

SEQ ID NO: 1153 - DNA, 16 bp, synthetic construct
  misc_feature 1..16: note = Description of Artificial Sequence: Syntheticoligonucleotide
  source 1..16: mol_type = other DNA
aatatagtagctggag

SEQ ID NO: 1154 - DNA, 16 bp, synthetic construct
  misc_feature 1..16: note = Description of Artificial Sequence: Syntheticoligonucleotide
  source 1..16: mol_type = other DNA
ccaccccgattttcct

SEQ ID NO: 1155 - DNA, 16 bp, synthetic construct
  misc_feature 1..16: note = Description of Artificial Sequence: Syntheticoligonucleotide
  source 1..16: mol_type = other DNA
ggatgacagtcaaggt

SEQ ID NO: 1156 - DNA, 16 bp, synthetic construct
  misc_feature 1..16: note = Description of Artificial Sequence: Syntheticoligonucleotide
  source 1..16: mol_type = other DNA
tgccaaaatagttctc

SEQ ID NO: 1157 - DNA, 16 bp, synthetic construct
  misc_feature 1..16: note = Description of Artificial Sequence: Syntheticoligonucleotide
  source 1..16: mol_type = other DNA
ctacaggcctgagatc

SEQ ID NO: 1158 - DNA, 16 bp, synthetic construct
  misc_feature 1..16: note = Description of Artificial Sequence: Syntheticoligonucleotide
  source 1..16: mol_type = other DNA
ggatgaatcaagcccc

SEQ ID NO: 1159 - DNA, 16 bp, synthetic construct
  misc_feature 1..16: note = Description of Artificial Sequence: Syntheticoligonucleotide
  source 1..16: mol_type = other DNA
ttggcatgctctggcc

SEQ ID NO: 1160 - DNA, 16 bp, synthetic construct
  misc_feature 1..16: note = Description of Artificial Sequence: Syntheticoligonucleotide
  source 1..16: mol_type = other DNA
gttagagtaagagctg

SEQ ID NO: 1161 - DNA, 16 bp, synthetic construct
  misc_feature 1..16: note = Description of Artificial Sequence: Syntheticoligonucleotide
  source 1..16: mol_type = other DNA
ttctgagaaggcattg

SEQ ID NO: 1162 - DNA, 16 bp, synthetic construct
  misc_feature 1..16: note = Description of Artificial Sequence: Syntheticoligonucleotide
  source 1..16: mol_type = other DNA
cagggaatttgatcag

SEQ ID NO: 1163 - DNA, 16 bp, synthetic construct
  misc_feature 1..16: note = Description of Artificial Sequence: Syntheticoligonucleotide
  source 1..16: mol_type = other DNA
gatgacttggctttag

SEQ ID NO: 1164 - DNA, 16 bp, synthetic construct
  misc_feature 1..16: note = Description of Artificial Sequence: Syntheticoligonucleotide
  source 1..16: mol_type = other DNA
gtatggttgttctggg

SEQ ID NO: 1165 - DNA, 16 bp, synthetic construct
  misc_feature 1..16: note = Description of Artificial Sequence: Syntheticoligonucleotide
  source 1..16: mol_type = other DNA
gaagccgcagacctct

SEQ ID NO: 1166 - DNA, 16 bp, synthetic construct
  misc_feature 1..16: note = Description of Artificial Sequence: Syntheticoligonucleotide
  source 1..16: mol_type = other DNA
gcaggcttggtgaagt

SEQ ID NO: 1167 - DNA, 16 bp, synthetic construct
  misc_feature 1..16: note = Description of Artificial Sequence: Syntheticoligonucleotide
  source 1..16: mol_type = other DNA
aagatctcggccctgg

SEQ ID NO: 1168 - DNA, 16 bp, synthetic construct
  misc_feature 1..16: note = Description of Artificial Sequence: Syntheticoligonucleotide
  source 1..16: mol_type = other DNA
tgcatgaaatgtggcc

SEQ ID NO: 1169 - DNA, 16 bp, synthetic construct
  misc_feature 1..16: note = Description of Artificial Sequence: Syntheticoligonucleotide
  source 1..16: mol_type = other DNA
cctggacacccattcc

SEQ ID NO: 1170 - DNA, 16 bp, synthetic construct
  misc_feature 1..16: note = Description of Artificial Sequence: Syntheticoligonucleotide
  source 1..16: mol_type = other DNA
tcttcgaagaccttct

SEQ ID NO: 1171 - DNA, 16 bp, synthetic construct
  misc_feature 1..16: note = Description of Artificial Sequence: Syntheticoligonucleotide
  source 1..16: mol_type = other DNA
aagccttggtcagtgc

SEQ ID NO: 1172 - DNA, 16 bp, synthetic construct
  misc_feature 1..16: note = Description of Artificial Sequence: Syntheticoligonucleotide
  source 1..16: mol_type = other DNA
ccacaggtgcctccgg

SEQ ID NO: 1173 - DNA, 16 bp, synthetic construct
  misc_feature 1..16: note = Description of Artificial Sequence: Syntheticoligonucleotide
  source 1..16: mol_type = other DNA
atctcattgagtgtcc

SEQ ID NO: 1174 - DNA, 16 bp, synthetic construct
  misc_feature 1..16: note = Description of Artificial Sequence: Syntheticoligonucleotide
  source 1..16: mol_type = other DNA
aggtgtagggttggaa

SEQ ID NO: 1175 - DNA, 16 bp, synthetic construct
  misc_feature 1..16: note = Description of Artificial Sequence: Syntheticoligonucleotide
  source 1..16: mol_type = other DNA
tgtttggctgcagggc

SEQ ID NO: 1176 - DNA, 16 bp, synthetic construct
  misc_feature 1..16: note = Description of Artificial Sequence: Syntheticoligonucleotide
  source 1..16: mol_type = other DNA
ttgagtgtactgaggc

SEQ ID NO: 1177 - DNA, 16 bp, synthetic construct
  misc_feature 1..16: note = Description of Artificial Sequence: Syntheticoligonucleotide
  source 1..16: mol_type = other DNA
agatcctgagggtact

SEQ ID NO: 1178 - DNA, 16 bp, synthetic construct
  misc_feature 1..16: note = Description of Artificial Sequence: Syntheticoligonucleotide
  source 1..16: mol_type = other DNA
tgaggcatggatcagg

SEQ ID NO: 1179 - DNA, 16 bp, synthetic construct
  misc_feature 1..16: note = Description of Artificial Sequence: Syntheticoligonucleotide
  source 1..16: mol_type = other DNA
gagggcgaggatcctt

SEQ ID NO: 1180 - DNA, 16 bp, synthetic construct
  misc_feature 1..16: note = Description of Artificial Sequence: Syntheticoligonucleotide
  source 1..16: mol_type = other DNA
gcctatgagcccagac

SEQ ID NO: 1181 - DNA, 16 bp, synthetic construct
  misc_feature 1..16: note = Description of Artificial Sequence: Syntheticoligonucleotide
  source 1..16: mol_type = other DNA
gagcagggacactcac

SEQ ID NO: 1182 - DNA, 16 bp, synthetic construct
  misc_feature 1..16: note = Description of Artificial Sequence: Syntheticoligonucleotide
  source 1..16: mol_type = other DNA
taagtcttctgccatt

SEQ ID NO: 1183 - DNA, 16 bp, synthetic construct
  misc_feature 1..16: note = Description of Artificial Sequence: Syntheticoligonucleotide
  source 1..16: mol_type = other DNA
gatgagaggcatcaag

SEQ ID NO: 1184 - DNA, 16 bp, synthetic construct
  misc_feature 1..16: note = Description of Artificial Sequence: Syntheticoligonucleotide
  source 1..16: mol_type = other DNA
caagaaaagagagcgg

SEQ ID NO: 1185 - DNA, 16 bp, synthetic construct
  misc_feature 1..16: note = Description of Artificial Sequence: Syntheticoligonucleotide
  source 1..16: mol_type = other DNA
tactagggtgaacaga

SEQ ID NO: 1186 - DNA, 16 bp, synthetic construct
  misc_feature 1..16: note = Description of Artificial Sequence: Syntheticoligonucleotide
  source 1..16: mol_type = other DNA
tacggttgacaatggt

SEQ ID NO: 1187 - DNA, 16 bp, synthetic construct
  misc_feature 1..16: note = Description of Artificial Sequence: Syntheticoligonucleotide
  source 1..16: mol_type = other DNA
cgtgagcacttacttt

SEQ ID NO: 1188 - DNA, 16 bp, synthetic construct
  misc_feature 1..16: note = Description of Artificial Sequence: Syntheticoligonucleotide
  source 1..16: mol_type = other DNA
aacgagaaacaaccgg

SEQ ID NO: 1189 - DNA, 16 bp, synthetic construct
  misc_feature 1..16: note = Description of Artificial Sequence: Syntheticoligonucleotide
  source 1..16: mol_type = other DNA
ctagggttagcttaag

SEQ ID NO: 1190 - DNA, 16 bp, synthetic construct
  misc_feature 1..16: note = Description of Artificial Sequence: Syntheticoligonucleotide
  source 1..16: mol_type = other DNA
aagatgaacaccctat

SEQ ID NO: 1191 - DNA, 16 bp, synthetic construct
  misc_feature 1..16: note = Description of Artificial Sequence: Syntheticoligonucleotide
  source 1..16: mol_type = other DNA
gactaacctatttgac

SEQ ID NO: 1192 - DNA, 16 bp, synthetic construct
  misc_feature 1..16: note = Description of Artificial Sequence: Syntheticoligonucleotide
  source 1..16: mol_type = other DNA
agtctggctccagtac

SEQ ID NO: 1193 - DNA, 16 bp, synthetic construct
  misc_feature 1..16: note = Description of Artificial Sequence: Syntheticoligonucleotide
  source 1..16: mol_type = other DNA
acacctaatgctgatc

SEQ ID NO: 1194 - DNA, 16 bp, synthetic construct
  misc_feature 1..16: note = Description of Artificial Sequence: Syntheticoligonucleotide
  source 1..16: mol_type = other DNA
gataattagggagaag

SEQ ID NO: 1195 - DNA, 16 bp, synthetic construct
  misc_feature 1..16: note = Description of Artificial Sequence: Syntheticoligonucleotide
  source 1..16: mol_type = other DNA
gctgggtattgaattg

SEQ ID NO: 1196 - DNA, 16 bp, synthetic construct
  misc_feature 1..16: note = Description of Artificial Sequence: Syntheticoligonucleotide
  source 1..16: mol_type = other DNA
acacaaagagcgagca

SEQ ID NO: 1197 - DNA, 16 bp, synthetic construct
  misc_feature 1..16: note = Description of Artificial Sequence: Syntheticoligonucleotide
  source 1..16: mol_type = other DNA
gtctggttaagtcatt

SEQ ID NO: 1198 - DNA, 16 bp, synthetic construct
  misc_feature 1..16: note = Description of Artificial Sequence: Syntheticoligonucleotide
  source 1..16: mol_type = other DNA
tcccacctagagtcct

SEQ ID NO: 1199 - DNA, 16 bp, synthetic construct
  misc_feature 1..16: note = Description of Artificial Sequence: Syntheticoligonucleotide
  source 1..16: mol_type = other DNA
gcccatcatcagactc

SEQ ID NO: 1200 - DNA, 16 bp, synthetic construct
  misc_feature 1..16: note = Description of Artificial Sequence: Syntheticoligonucleotide
  source 1..16: mol_type = other DNA
cttcatagggcctctt

SEQ ID NO: 1201 - DNA, 16 bp, synthetic construct
  misc_feature 1..16: note = Description of Artificial Sequence: Syntheticoligonucleotide
  source 1..16: mol_type = other DNA
gatactgggacccctg

SEQ ID NO: 1202 - DNA, 16 bp, synthetic construct
  misc_feature 1..16: note = Description of Artificial Sequence: Syntheticoligonucleotide
  source 1..16: mol_type = other DNA
caccccacaggtttcg

SEQ ID NO: 1203 - DNA, 16 bp, synthetic construct
  misc_feature 1..16: note = Description of Artificial Sequence: Syntheticoligonucleotide
  source 1..16: mol_type = other DNA
cccagatttttccgcc

SEQ ID NO: 1204 - DNA, 16 bp, synthetic construct
  misc_feature 1..16: note = Description of Artificial Sequence: Syntheticoligonucleotide
  source 1..16: mol_type = other DNA
gagatgatctgtctgg

SEQ ID NO: 1205 - DNA, 16 bp, synthetic construct
  misc_feature 1..16: note = Description of Artificial Sequence: Syntheticoligonucleotide
  source 1..16: mol_type = other DNA
atttcggtgcaaatgg

SEQ ID NO: 1206 - DNA, 16 bp, synthetic construct
  misc_feature 1..16: note = Description of Artificial Sequence: Syntheticoligonucleotide
  source 1..16: mol_type = other DNA
gggcttagaacattac

SEQ ID NO: 1207 - DNA, 16 bp, synthetic construct
  misc_feature 1..16: note = Description of Artificial Sequence: Syntheticoligonucleotide
  source 1..16: mol_type = other DNA
gaactccacttctttc

SEQ ID NO: 1208 - DNA, 16 bp, synthetic construct
  misc_feature 1..16: note = Description of Artificial Sequence: Syntheticoligonucleotide
  source 1..16: mol_type = other DNA
tccgggccccctgctg

SEQ ID NO: 1209 - DNA, 16 bp, synthetic construct
  misc_feature 1..16: note = Description of Artificial Sequence: Syntheticoligonucleotide
  source 1..16: mol_type = other DNA
gcctgtagaagcttct

SEQ ID NO: 1210 - DNA, 16 bp, synthetic construct
  misc_feature 1..16: note = Description of Artificial Sequence: Syntheticoligonucleotide
  source 1..16: mol_type = other DNA
tgaagagtctggcatt

SEQ ID NO: 1211 - DNA, 16 bp, synthetic construct
  misc_feature 1..16: note = Description of Artificial Sequence: Syntheticoligonucleotide
  source 1..16: mol_type = other DNA
gttttagcttgagcag

SEQ ID NO: 1212 - DNA, 16 bp, synthetic construct
  misc_feature 1..16: note = Description of Artificial Sequence: Syntheticoligonucleotide
  source 1..16: mol_type = other DNA
tattgtaacagtcctg

SEQ ID NO: 1213 - DNA, 16 bp, synthetic construct
  misc_feature 1..16: note = Description of Artificial Sequence: Syntheticoligonucleotide
  source 1..16: mol_type = other DNA
ccctccacttgagagc

SEQ ID NO: 1214 - DNA, 16 bp, synthetic construct
  misc_feature 1..16: note = Description of Artificial Sequence: Syntheticoligonucleotide
  source 1..16: mol_type = other DNA
ttggctgggacatgtc

SEQ ID NO: 1215 - DNA, 16 bp, synthetic construct
  misc_feature 1..16: note = Description of Artificial Sequence: Syntheticoligonucleotide
  source 1..16: mol_type = other DNA
cacagtaaaggtcggc

SEQ ID NO: 1216 - DNA, 16 bp, synthetic construct
  misc_feature 1..16: note = Description of Artificial Sequence: Syntheticoligonucleotide
  source 1..16: mol_type = other DNA
atcgagtaacttttta

SEQ ID NO: 1217 - DNA, 16 bp, synthetic construct
  misc_feature 1..16: note = Description of Artificial Sequence: Syntheticoligonucleotide
  source 1..16: mol_type = other DNA
gggtgagaggccatcc

SEQ ID NO: 1218 - DNA, 16 bp, synthetic construct
  misc_feature 1..16: note = Description of Artificial Sequence: Syntheticoligonucleotide
  source 1..16: mol_type = other DNA
attcagaatagcctac

SEQ ID NO: 1219 - DNA, 16 bp, synthetic construct
  misc_feature 1..16: note = Description of Artificial Sequence: Syntheticoligonucleotide
  source 1..16: mol_type = other DNA
gacattttgactagct

SEQ ID NO: 1220 - DNA, 16 bp, synthetic construct
  misc_feature 1..16: note = Description of Artificial Sequence: Syntheticoligonucleotide
  source 1..16: mol_type = other DNA
cctgagcctcgaaaac

SEQ ID NO: 1221 - DNA, 16 bp, synthetic construct
  misc_feature 1..16: note = Description of Artificial Sequence: Syntheticoligonucleotide
  source 1..16: mol_type = other DNA
ttgaacccacagtctc

SEQ ID NO: 1222 - DNA, 16 bp, synthetic construct
  misc_feature 1..16: note = Description of Artificial Sequence: Syntheticoligonucleotide
  source 1..16: mol_type = other DNA
gaataaggctggcatg

SEQ ID NO: 1223 - DNA, 16 bp, synthetic construct
  misc_feature 1..16: note = Description of Artificial Sequence: Syntheticoligonucleotide
  source 1..16: mol_type = other DNA
ttggaagtgtggtgag

SEQ ID NO: 1224 - DNA, 16 bp, synthetic construct
  misc_feature 1..16: note = Description of Artificial Sequence: Syntheticoligonucleotide
  source 1..16: mol_type = other DNA
ctatccctatccctta

SEQ ID NO: 1225 - DNA, 16 bp, synthetic construct
  misc_feature 1..16: note = Description of Artificial Sequence: Syntheticoligonucleotide
  source 1..16: mol_type = other DNA
tggcacaaacatgagg

SEQ ID NO: 1226 - DNA, 16 bp, synthetic construct
  misc_feature 1..16: note = Description of Artificial Sequence: Syntheticoligonucleotide
  source 1..16: mol_type = other DNA
taacaactcaggatca

SEQ ID NO: 1227 - DNA, 16 bp, synthetic construct
  misc_feature 1..16: note = Description of Artificial Sequence: Syntheticoligonucleotide
  source 1..16: mol_type = other DNA
tcacctaaacccccct

SEQ ID NO: 1228 - DNA, 16 bp, synthetic construct
  misc_feature 1..16: note = Description of Artificial Sequence: Syntheticoligonucleotide
  source 1..16: mol_type = other DNA
ttgtcggatgatgcct

SEQ ID NO: 1229 - DNA, 16 bp, synthetic construct
  misc_feature 1..16: note = Description of Artificial Sequence: Syntheticoligonucleotide
  source 1..16: mol_type = other DNA
cttttgtgagcggatg

SEQ ID NO: 1230 - DNA, 16 bp, synthetic construct
  misc_feature 1..16: note = Description of Artificial Sequence: Syntheticoligonucleotide
  source 1..16: mol_type = other DNA
gaatatagtagctgga

SEQ ID NO: 1231 - DNA, 16 bp, synthetic construct
  misc_feature 1..16: note = Description of Artificial Sequence: Syntheticoligonucleotide
  source 1..16: mol_type = other DNA
tccaccccgattttcc

SEQ ID NO: 1232 - DNA, 16 bp, synthetic construct
  misc_feature 1..16: note = Description of Artificial Sequence: Syntheticoligonucleotide
  source 1..16: mol_type = other DNA
ccaggatgacagtcaa

SEQ ID NO: 1233 - DNA, 16 bp, synthetic construct
  misc_feature 1..16: note = Description of Artificial Sequence: Syntheticoligonucleotide
  source 1..16: mol_type = other DNA
atttattctttgcacc

SEQ ID NO: 1234 - DNA, 16 bp, synthetic construct
  misc_feature 1..16: note = Description of Artificial Sequence: Syntheticoligonucleotide
  source 1..16: mol_type = other DNA
tctacaggcctgagat

SEQ ID NO: 1235 - DNA, 16 bp, synthetic construct
  misc_feature 1..16: note = Description of Artificial Sequence: Syntheticoligonucleotide
  source 1..16: mol_type = other DNA
aggaactctgtcagag

SEQ ID NO: 1236 - DNA, 16 bp, synthetic construct
  misc_feature 1..16: note = Description of Artificial Sequence: Syntheticoligonucleotide
  source 1..16: mol_type = other DNA
aatttggcatgctctg

SEQ ID NO: 1237 - DNA, 16 bp, synthetic construct
  misc_feature 1..16: note = Description of Artificial Sequence: Syntheticoligonucleotide
  source 1..16: mol_type = other DNA
agttagagtaagagct

SEQ ID NO: 1238 - DNA, 16 bp, synthetic construct
  misc_feature 1..16: note = Description of Artificial Sequence: Syntheticoligonucleotide
  source 1..16: mol_type = other DNA
gatgaaggttctgaga

SEQ ID NO: 1239 - DNA, 16 bp, synthetic construct
  misc_feature 1..16: note = Description of Artificial Sequence: Syntheticoligonucleotide
  source 1..16: mol_type = other DNA
gtcagggaatttgatc

SEQ ID NO: 1240 - DNA, 16 bp, synthetic construct
  misc_feature 1..16: note = Description of Artificial Sequence: Syntheticoligonucleotide
  source 1..16: mol_type = other DNA
atgggatgacttggct

SEQ ID NO: 1241 - DNA, 16 bp, synthetic construct
  misc_feature 1..16: note = Description of Artificial Sequence: Syntheticoligonucleotide
  source 1..16: mol_type = other DNA
tgggtatggttgttct

SEQ ID NO: 1242 - DNA, 16 bp, synthetic construct
  misc_feature 1..16: note = Description of Artificial Sequence: Syntheticoligonucleotide
  source 1..16: mol_type = other DNA
tgtggaagccgcagac

SEQ ID NO: 1243 - DNA, 16 bp, synthetic construct
  misc_feature 1..16: note = Description of Artificial Sequence: Syntheticoligonucleotide
  source 1..16: mol_type = other DNA
caagggcaggcttggt

SEQ ID NO: 1244 - DNA, 16 bp, synthetic construct
  misc_feature 1..16: note = Description of Artificial Sequence: Syntheticoligonucleotide
  source 1..16: mol_type = other DNA
cgaagatctcggccct

SEQ ID NO: 1245 - DNA, 16 bp, synthetic construct
  misc_feature 1..16: note = Description of Artificial Sequence: Syntheticoligonucleotide
  source 1..16: mol_type = other DNA
ggtgcatgaaatgtgg

SEQ ID NO: 1246 - DNA, 16 bp, synthetic construct
  misc_feature 1..16: note = Description of Artificial Sequence: Syntheticoligonucleotide
  source 1..16: mol_type = other DNA
ccctggacacccattc

SEQ ID NO: 1247 - DNA, 16 bp, synthetic construct
  misc_feature 1..16: note = Description of Artificial Sequence: Syntheticoligonucleotide
  source 1..16: mol_type = other DNA
ctcttcgaagaccttc

SEQ ID NO: 1248 - DNA, 16 bp, synthetic construct
  misc_feature 1..16: note = Description of Artificial Sequence: Syntheticoligonucleotide
  source 1..16: mol_type = other DNA
gaagccttggtcagtg

SEQ ID NO: 1249 - DNA, 16 bp, synthetic construct
  misc_feature 1..16: note = Description of Artificial Sequence: Syntheticoligonucleotide
  source 1..16: mol_type = other DNA
taccccacaggtgcct

SEQ ID NO: 1250 - DNA, 16 bp, synthetic construct
  misc_feature 1..16: note = Description of Artificial Sequence: Syntheticoligonucleotide
  source 1..16: mol_type = other DNA
gtggtagatctcattg

SEQ ID NO: 1251 - DNA, 16 bp, synthetic construct
  misc_feature 1..16: note = Description of Artificial Sequence: Syntheticoligonucleotide
  source 1..16: mol_type = other DNA
caggtgtagggttgga

SEQ ID NO: 1252 - DNA, 16 bp, synthetic construct
  misc_feature 1..16: note = Description of Artificial Sequence: Syntheticoligonucleotide
  source 1..16: mol_type = other DNA
gtgaaggctctgtttg

SEQ ID NO: 1253 - DNA, 16 bp, synthetic construct
  misc_feature 1..16: note = Description of Artificial Sequence: Syntheticoligonucleotide
  source 1..16: mol_type = other DNA
gtttgagtgtactgag

SEQ ID NO: 1254 - DNA, 16 bp, synthetic construct
  misc_feature 1..16: note = Description of Artificial Sequence: Syntheticoligonucleotide
  source 1..16: mol_type = other DNA
tcagatcctgagggta

SEQ ID NO: 1255 - DNA, 16 bp, synthetic construct
  misc_feature 1..16: note = Description of Artificial Sequence: Syntheticoligonucleotide
  source 1..16: mol_type = other DNA
ctgaggcatggatcag

SEQ ID NO: 1256 - DNA, 16 bp, synthetic construct
  misc_feature 1..16: note = Description of Artificial Sequence: Syntheticoligonucleotide
  source 1..16: mol_type = other DNA
ggagggcgaggatcct

SEQ ID NO: 1257 - DNA, 16 bp, synthetic construct
  misc_feature 1..16: note = Description of Artificial Sequence: Syntheticoligonucleotide
  source 1..16: mol_type = other DNA
aatgtgcctatgagcc

SEQ ID NO: 1258 - DNA, 16 bp, synthetic construct
  misc_feature 1..16: note = Description of Artificial Sequence: Syntheticoligonucleotide
  source 1..16: mol_type = other DNA
cccgccgtgcctacct

SEQ ID NO: 1259 - DNA, 16 bp, synthetic construct
  misc_feature 1..16: note = Description of Artificial Sequence: Syntheticoligonucleotide
  source 1..16: mol_type = other DNA
gtacttcacctttaag

SEQ ID NO: 1260 - DNA, 16 bp, synthetic construct
  misc_feature 1..16: note = Description of Artificial Sequence: Syntheticoligonucleotide
  source 1..16: mol_type = other DNA
ggatgagaggcatcaa

SEQ ID NO: 1261 - DNA, 16 bp, synthetic construct
  misc_feature 1..16: note = Description of Artificial Sequence: Syntheticoligonucleotide
  source 1..16: mol_type = other DNA
gcaagaaaagagagcg

SEQ ID NO: 1262 - DNA, 16 bp, synthetic construct
  misc_feature 1..16: note = Description of Artificial Sequence: Syntheticoligonucleotide
  source 1..16: mol_type = other DNA
ctactagggtgaacag

SEQ ID NO: 1263 - DNA, 16 bp, synthetic construct
  misc_feature 1..16: note = Description of Artificial Sequence: Syntheticoligonucleotide
  source 1..16: mol_type = other DNA
ctacggttgacaatgg

SEQ ID NO: 1264 - DNA, 16 bp, synthetic construct
  misc_feature 1..16: note = Description of Artificial Sequence: Syntheticoligonucleotide
  source 1..16: mol_type = other DNA
tctaatttggttacag

SEQ ID NO: 1265 - DNA, 16 bp, synthetic construct
  misc_feature 1..16: note = Description of Artificial Sequence: Syntheticoligonucleotide
  source 1..16: mol_type = other DNA
aaacgagaaacaaccg

SEQ ID NO: 1266 - DNA, 16 bp, synthetic construct
  misc_feature 1..16: note = Description of Artificial Sequence: Syntheticoligonucleotide
  source 1..16: mol_type = other DNA
acctagggttagctta

SEQ ID NO: 1267 - DNA, 16 bp, synthetic construct
  misc_feature 1..16: note = Description of Artificial Sequence: Syntheticoligonucleotide
  source 1..16: mol_type = other DNA
taagatgaacacccta

SEQ ID NO: 1268 - DNA, 16 bp, synthetic construct
  misc_feature 1..16: note = Description of Artificial Sequence: Syntheticoligonucleotide
  source 1..16: mol_type = other DNA
agactaacctatttga

SEQ ID NO: 1269 - DNA, 16 bp, synthetic construct
  misc_feature 1..16: note = Description of Artificial Sequence: Syntheticoligonucleotide
  source 1..16: mol_type = other DNA
ctgggtttgtcccaga

SEQ ID NO: 1270 - DNA, 16 bp, synthetic construct
  misc_feature 1..16: note = Description of Artificial Sequence: Syntheticoligonucleotide
  source 1..16: mol_type = other DNA
taacacctaatgctga

SEQ ID NO: 1271 - DNA, 16 bp, synthetic construct
  misc_feature 1..16: note = Description of Artificial Sequence: Syntheticoligonucleotide
  source 1..16: mol_type = other DNA
ctgagataattaggga

SEQ ID NO: 1272 - DNA, 16 bp, synthetic construct
  misc_feature 1..16: note = Description of Artificial Sequence: Syntheticoligonucleotide
  source 1..16: mol_type = other DNA
ggctgggtattgaatt

SEQ ID NO: 1273 - DNA, 16 bp, synthetic construct
  misc_feature 1..16: note = Description of Artificial Sequence: Syntheticoligonucleotide
  source 1..16: mol_type = other DNA
cacacaaagagcgagc

SEQ ID NO: 1274 - DNA, 16 bp, synthetic construct
  misc_feature 1..16: note = Description of Artificial Sequence: Syntheticoligonucleotide
  source 1..16: mol_type = other DNA
cttctacgctgtctgg

SEQ ID NO: 1275 - DNA, 16 bp, synthetic construct
  misc_feature 1..16: note = Description of Artificial Sequence: Syntheticoligonucleotide
  source 1..16: mol_type = other DNA
ggagagagccagaacc

SEQ ID NO: 1276 - DNA, 16 bp, synthetic construct
  misc_feature 1..16: note = Description of Artificial Sequence: Syntheticoligonucleotide
  source 1..16: mol_type = other DNA
tacagagcccatcatc

SEQ ID NO: 1277 - DNA, 16 bp, synthetic construct
  misc_feature 1..16: note = Description of Artificial Sequence: Syntheticoligonucleotide
  source 1..16: mol_type = other DNA
agtcaggcagcttgct

SEQ ID NO: 1278 - DNA, 16 bp, synthetic construct
  misc_feature 1..16: note = Description of Artificial Sequence: Syntheticoligonucleotide
  source 1..16: mol_type = other DNA
agatactgggacccct

SEQ ID NO: 1279 - DNA, 16 bp, synthetic construct
  misc_feature 1..16: note = Description of Artificial Sequence: Syntheticoligonucleotide
  source 1..16: mol_type = other DNA
gataccccaccccaca

SEQ ID NO: 1280 - DNA, 16 bp, synthetic construct
  misc_feature 1..16: note = Description of Artificial Sequence: Syntheticoligonucleotide
  source 1..16: mol_type = other DNA
gcccagatttttccgc

SEQ ID NO: 1281 - DNA, 16 bp, synthetic construct
  misc_feature 1..16: note = Description of Artificial Sequence: Syntheticoligonucleotide
  source 1..16: mol_type = other DNA
ggagatgatctgtctg

SEQ ID NO: 1282 - DNA, 16 bp, synthetic construct
  misc_feature 1..16: note = Description of Artificial Sequence: Syntheticoligonucleotide
  source 1..16: mol_type = other DNA
gatttcggtgcaaatg

SEQ ID NO: 1283 - DNA, 16 bp, synthetic construct
  misc_feature 1..16: note = Description of Artificial Sequence: Syntheticoligonucleotide
  source 1..16: mol_type = other DNA
gttcttagtctcctgg

SEQ ID NO: 1284 - DNA, 16 bp, synthetic construct
  misc_feature 1..16: note = Description of Artificial Sequence: Syntheticoligonucleotide
  source 1..16: mol_type = other DNA
gagaactccacttctt

SEQ ID NO: 1285 - DNA, 16 bp, synthetic construct
  misc_feature 1..16: note = Description of Artificial Sequence: Syntheticoligonucleotide
  source 1..16: mol_type = other DNA
ccacaatggctccggg

SEQ ID NO: 1286 - DNA, 16 bp, synthetic construct
  misc_feature 1..16: note = Description of Artificial Sequence: Syntheticoligonucleotide
  source 1..16: mol_type = other DNA
agcatggcaagtgaca

SEQ ID NO: 1287 - DNA, 16 bp, synthetic construct
  misc_feature 1..16: note = Description of Artificial Sequence: Syntheticoligonucleotide
  source 1..16: mol_type = other DNA
atgaagagtctggcat

SEQ ID NO: 1288 - DNA, 16 bp, synthetic construct
  misc_feature 1..16: note = Description of Artificial Sequence: Syntheticoligonucleotide
  source 1..16: mol_type = other DNA
ggttttagcttgagca

SEQ ID NO: 1289 - DNA, 16 bp, synthetic construct
  misc_feature 1..16: note = Description of Artificial Sequence: Syntheticoligonucleotide
  source 1..16: mol_type = other DNA
ctattgtaacagtcct

SEQ ID NO: 1290 - DNA, 16 bp, synthetic construct
  misc_feature 1..16: note = Description of Artificial Sequence: Syntheticoligonucleotide
  source 1..16: mol_type = other DNA
caatggttgtttcccc

SEQ ID NO: 1291 - DNA, 16 bp, synthetic construct
  misc_feature 1..16: note = Description of Artificial Sequence: Syntheticoligonucleotide
  source 1..16: mol_type = other DNA
gcattggctgggacat

SEQ ID NO: 1292 - DNA, 16 bp, synthetic construct
  misc_feature 1..16: note = Description of Artificial Sequence: Syntheticoligonucleotide
  source 1..16: mol_type = other DNA
ccacagtaaaggtcgg

SEQ ID NO: 1293 - DNA, 16 bp, synthetic construct
  misc_feature 1..16: note = Description of Artificial Sequence: Syntheticoligonucleotide
  source 1..16: mol_type = other DNA
gatcgagtaacttttt

SEQ ID NO: 1294 - DNA, 16 bp, synthetic construct
  misc_feature 1..16: note = Description of Artificial Sequence: Syntheticoligonucleotide
  source 1..16: mol_type = other DNA
acctggtgcatgaaat

SEQ ID NO: 1295 - DNA, 16 bp, synthetic construct
  misc_feature 1..16: note = Description of Artificial Sequence: Syntheticoligonucleotide
  source 1..16: mol_type = other DNA
caattcagaatagcct

SEQ ID NO: 1296 - DNA, 16 bp, synthetic construct
  misc_feature 1..16: note = Description of Artificial Sequence: Syntheticoligonucleotide
  source 1..16: mol_type = other DNA
tgacattttgactagc

SEQ ID NO: 1297 - DNA, 16 bp, synthetic construct
  misc_feature 1..16: note = Description of Artificial Sequence: Syntheticoligonucleotide
  source 1..16: mol_type = other DNA
attttgagcttcccac

SEQ ID NO: 1298 - DNA, 16 bp, synthetic construct
  misc_feature 1..16: note = Description of Artificial Sequence: Syntheticoligonucleotide
  source 1..16: mol_type = other DNA
tttgaacccacagtct

SEQ ID NO: 1299 - DNA, 16 bp, synthetic construct
  misc_feature 1..16: note = Description of Artificial Sequence: Syntheticoligonucleotide
  source 1..16: mol_type = other DNA
ggaataaggctggcat

SEQ ID NO: 1300 - DNA, 16 bp, synthetic construct
  misc_feature 1..16: note = Description of Artificial Sequence: Syntheticoligonucleotide
  source 1..16: mol_type = other DNA
gagataatgttggaag

SEQ ID NO: 1301 - DNA, 16 bp, synthetic construct
  misc_feature 1..16: note = Description of Artificial Sequence: Syntheticoligonucleotide
  source 1..16: mol_type = other DNA
actatccctatccctt

SEQ ID NO: 1302 - DNA, 16 bp, synthetic construct
  misc_feature 1..16: note = Description of Artificial Sequence: Syntheticoligonucleotide
  source 1..16: mol_type = other DNA
caccacagatgaagcc

SEQ ID NO: 1303 - DNA, 16 bp, synthetic construct
  misc_feature 1..16: note = Description of Artificial Sequence: Syntheticoligonucleotide
  source 1..16: mol_type = other DNA
ttaacaactcaggatc

SEQ ID NO: 1304 - DNA, 16 bp, synthetic construct
  misc_feature 1..16: note = Description of Artificial Sequence: Syntheticoligonucleotide
  source 1..16: mol_type = other DNA
agtcacctaaaccccc

SEQ ID NO: 1305 - DNA, 16 bp, synthetic construct
  misc_feature 1..16: note = Description of Artificial Sequence: Syntheticoligonucleotide
  source 1..16: mol_type = other DNA
ttacctgggaatgtgc

SEQ ID NO: 1306 - DNA, 16 bp, synthetic construct
  misc_feature 1..16: note = Description of Artificial Sequence: Syntheticoligonucleotide
  source 1..16: mol_type = other DNA
gcttttgtgagcggat

SEQ ID NO: 1307 - DNA, 16 bp, synthetic construct
  misc_feature 1..16: note = Description of Artificial Sequence: Syntheticoligonucleotide
  source 1..16: mol_type = other DNA
cgaatatagtagctgg

SEQ ID NO: 1308 - DNA, 16 bp, synthetic construct
  misc_feature 1..16: note = Description of Artificial Sequence: Syntheticoligonucleotide
  source 1..16: mol_type = other DNA
atccaccccgattttc

SEQ ID NO: 1309 - DNA, 16 bp, synthetic construct
  misc_feature 1..16: note = Description of Artificial Sequence: Syntheticoligonucleotide
  source 1..16: mol_type = other DNA
tgcaagaggttaaatg

SEQ ID NO: 1310 - DNA, 16 bp, synthetic construct
  misc_feature 1..16: note = Description of Artificial Sequence: Syntheticoligonucleotide
  source 1..16: mol_type = other DNA
cataagttgtatcatt

SEQ ID NO: 1311 - DNA, 16 bp, synthetic construct
  misc_feature 1..16: note = Description of Artificial Sequence: Syntheticoligonucleotide
  source 1..16: mol_type = other DNA
gtctacaggcctgaga

SEQ ID NO: 1312 - DNA, 16 bp, synthetic construct
  misc_feature 1..16: note = Description of Artificial Sequence: Syntheticoligonucleotide
  source 1..16: mol_type = other DNA
gaggaactctgtcaga

SEQ ID NO: 1313 - DNA, 16 bp, synthetic construct
  misc_feature 1..16: note = Description of Artificial Sequence: Syntheticoligonucleotide
  source 1..16: mol_type = other DNA
gaatttggcatgctct

SEQ ID NO: 1314 - DNA, 16 bp, synthetic construct
  misc_feature 1..16: note = Description of Artificial Sequence: Syntheticoligonucleotide
  source 1..16: mol_type = other DNA
gagttagagtaagagc

SEQ ID NO: 1315 - DNA, 16 bp, synthetic construct
  misc_feature 1..16: note = Description of Artificial Sequence: Syntheticoligonucleotide
  source 1..16: mol_type = other DNA
ggatgaaggttctgag

SEQ ID NO: 1316 - DNA, 16 bp, synthetic construct
  misc_feature 1..16: note = Description of Artificial Sequence: Syntheticoligonucleotide
  source 1..16: mol_type = other DNA
ggtcagggaatttgat

SEQ ID NO: 1317 - DNA, 16 bp, synthetic construct
  misc_feature 1..16: note = Description of Artificial Sequence: Syntheticoligonucleotide
  source 1..16: mol_type = other DNA
ttaagagtcaggctgg

SEQ ID NO: 1318 - DNA, 16 bp, synthetic construct
  misc_feature 1..16: note = Description of Artificial Sequence: Syntheticoligonucleotide
  source 1..16: mol_type = other DNA
gtgggtatggttgttc

SEQ ID NO: 1319 - DNA, 16 bp, synthetic construct
  misc_feature 1..16: note = Description of Artificial Sequence: Syntheticoligonucleotide
  source 1..16: mol_type = other DNA
ggtgtggaagccgcag

SEQ ID NO: 1320 - DNA, 16 bp, synthetic construct
  misc_feature 1..16: note = Description of Artificial Sequence: Syntheticoligonucleotide
  source 1..16: mol_type = other DNA
gggtccttgtccaagg

SEQ ID NO: 1321 - DNA, 16 bp, synthetic construct
  misc_feature 1..16: note = Description of Artificial Sequence: Syntheticoligonucleotide
  source 1..16: mol_type = other DNA
cctcgaagatctcggc

SEQ ID NO: 1322 - DNA, 16 bp, synthetic construct
  misc_feature 1..16: note = Description of Artificial Sequence: Syntheticoligonucleotide
  source 1..16: mol_type = other DNA
tggtgcatgaaatgtg

SEQ ID NO: 1323 - DNA, 16 bp, synthetic construct
  misc_feature 1..16: note = Description of Artificial Sequence: Syntheticoligonucleotide
  source 1..16: mol_type = other DNA
tccctggacacccatt

SEQ ID NO: 1324 - DNA, 16 bp, synthetic construct
  misc_feature 1..16: note = Description of Artificial Sequence: Syntheticoligonucleotide
  source 1..16: mol_type = other DNA
gctcttcgaagacctt

SEQ ID NO: 1325 - DNA, 16 bp, synthetic construct
  misc_feature 1..16: note = Description of Artificial Sequence: Syntheticoligonucleotide
  source 1..16: mol_type = other DNA
atgaagccttggtcag

SEQ ID NO: 1326 - DNA, 16 bp, synthetic construct
  misc_feature 1..16: note = Description of Artificial Sequence: Syntheticoligonucleotide
  source 1..16: mol_type = other DNA
ctaccccacaggtgcc

SEQ ID NO: 1327 - DNA, 16 bp, synthetic construct
  misc_feature 1..16: note = Description of Artificial Sequence: Syntheticoligonucleotide
  source 1..16: mol_type = other DNA
agaaggcaaacatgcg

SEQ ID NO: 1328 - DNA, 16 bp, synthetic construct
  misc_feature 1..16: note = Description of Artificial Sequence: Syntheticoligonucleotide
  source 1..16: mol_type = other DNA
gccaggtgtagggttg

SEQ ID NO: 1329 - DNA, 16 bp, synthetic construct
  misc_feature 1..16: note = Description of Artificial Sequence: Syntheticoligonucleotide
  source 1..16: mol_type = other DNA
tgtgaaggctctgttt

SEQ ID NO: 1330 - DNA, 16 bp, synthetic construct
  misc_feature 1..16: note = Description of Artificial Sequence: Syntheticoligonucleotide
  source 1..16: mol_type = other DNA
tgtttgagtgtactga

SEQ ID NO: 1331 - DNA, 16 bp, synthetic construct
  misc_feature 1..16: note = Description of Artificial Sequence: Syntheticoligonucleotide
  source 1..16: mol_type = other DNA
ctcagatcctgagggt

SEQ ID NO: 1332 - DNA, 16 bp, synthetic construct
  misc_feature 1..16: note = Description of Artificial Sequence: Syntheticoligonucleotide
  source 1..16: mol_type = other DNA
gctgaggcatggatca

SEQ ID NO: 1333 - DNA, 16 bp, synthetic construct
  misc_feature 1..16: note = Description of Artificial Sequence: Syntheticoligonucleotide
  source 1..16: mol_type = other DNA
aggagggcgaggatcc

SEQ ID NO: 1334 - DNA, 16 bp, synthetic construct
  misc_feature 1..16: note = Description of Artificial Sequence: Syntheticoligonucleotide
  source 1..16: mol_type = other DNA
cccaatgtgcctatga

SEQ ID NO: 1335 - DNA, 16 bp, synthetic construct
  misc_feature 1..16: note = Description of Artificial Sequence: Syntheticoligonucleotide
  source 1..16: mol_type = other DNA
ccagagggcccctgac

SEQ ID NO: 1336 - DNA, 16 bp, synthetic construct
  misc_feature 1..16: note = Description of Artificial Sequence: Syntheticoligonucleotide
  source 1..16: mol_type = other DNA
agtacttcacctttaa

SEQ ID NO: 1337 - DNA, 16 bp, synthetic construct
  misc_feature 1..16: note = Description of Artificial Sequence: Syntheticoligonucleotide
  source 1..16: mol_type = other DNA
aaggatgagaggcatc

SEQ ID NO: 1338 - DNA, 16 bp, synthetic construct
  misc_feature 1..16: note = Description of Artificial Sequence: Syntheticoligonucleotide
  source 1..16: mol_type = other DNA
taggctggatgctggc

SEQ ID NO: 1339 - DNA, 16 bp, synthetic construct
  misc_feature 1..16: note = Description of Artificial Sequence: Syntheticoligonucleotide
  source 1..16: mol_type = other DNA
tgctactagggtgaac

SEQ ID NO: 1340 - DNA, 16 bp, synthetic construct
  misc_feature 1..16: note = Description of Artificial Sequence: Syntheticoligonucleotide
  source 1..16: mol_type = other DNA
actacggttgacaatg

SEQ ID NO: 1341 - DNA, 16 bp, synthetic construct
  misc_feature 1..16: note = Description of Artificial Sequence: Syntheticoligonucleotide
  source 1..16: mol_type = other DNA
catgattctaatttgg

SEQ ID NO: 1342 - DNA, 16 bp, synthetic construct
  misc_feature 1..16: note = Description of Artificial Sequence: Syntheticoligonucleotide
  source 1..16: mol_type = other DNA
agtcagggatgtttat

SEQ ID NO: 1343 - DNA, 16 bp, synthetic construct
  misc_feature 1..16: note = Description of Artificial Sequence: Syntheticoligonucleotide
  source 1..16: mol_type = other DNA
cacctagggttagctt

SEQ ID NO: 1344 - DNA, 16 bp, synthetic construct
  misc_feature 1..16: note = Description of Artificial Sequence: Syntheticoligonucleotide
  source 1..16: mol_type = other DNA
ataagatgaacaccct

SEQ ID NO: 1345 - DNA, 16 bp, synthetic construct
  misc_feature 1..16: note = Description of Artificial Sequence: Syntheticoligonucleotide
  source 1..16: mol_type = other DNA
aagactaacctatttg

SEQ ID NO: 1346 - DNA, 16 bp, synthetic construct
  misc_feature 1..16: note = Description of Artificial Sequence: Syntheticoligonucleotide
  source 1..16: mol_type = other DNA
gctgggtttgtcccag

SEQ ID NO: 1347 - DNA, 16 bp, synthetic construct
  misc_feature 1..16: note = Description of Artificial Sequence: Syntheticoligonucleotide
  source 1..16: mol_type = other DNA
tttaacacctaatgct

SEQ ID NO: 1348 - DNA, 16 bp, synthetic construct
  misc_feature 1..16: note = Description of Artificial Sequence: Syntheticoligonucleotide
  source 1..16: mol_type = other DNA
tctgagataattaggg

SEQ ID NO: 1349 - DNA, 16 bp, synthetic construct
  misc_feature 1..16: note = Description of Artificial Sequence: Syntheticoligonucleotide
  source 1..16: mol_type = other DNA
atggctgggtattgaa

SEQ ID NO: 1350 - DNA, 16 bp, synthetic construct
  misc_feature 1..16: note = Description of Artificial Sequence: Syntheticoligonucleotide
  source 1..16: mol_type = other DNA
ggatacatagagacaa

SEQ ID NO: 1351 - DNA, 16 bp, synthetic construct
  misc_feature 1..16: note = Description of Artificial Sequence: Syntheticoligonucleotide
  source 1..16: mol_type = other DNA
gccagggcccttctac

SEQ ID NO: 1352 - DNA, 16 bp, synthetic construct
  misc_feature 1..16: note = Description of Artificial Sequence: Syntheticoligonucleotide
  source 1..16: mol_type = other DNA
aatacagagcccatca

SEQ ID NO: 1353 - DNA, 16 bp, synthetic construct
  misc_feature 1..16: note = Description of Artificial Sequence: Syntheticoligonucleotide
  source 1..16: mol_type = other DNA
gaaagtcaggcagctt

SEQ ID NO: 1354 - DNA, 16 bp, synthetic construct
  misc_feature 1..16: note = Description of Artificial Sequence: Syntheticoligonucleotide
  source 1..16: mol_type = other DNA
cacagatactgggacc

SEQ ID NO: 1355 - DNA, 16 bp, synthetic construct
  misc_feature 1..16: note = Description of Artificial Sequence: Syntheticoligonucleotide
  source 1..16: mol_type = other DNA
gcagataccccacccc

SEQ ID NO: 1356 - DNA, 16 bp, synthetic construct
  misc_feature 1..16: note = Description of Artificial Sequence: Syntheticoligonucleotide
  source 1..16: mol_type = other DNA
gacttgcccagatttt

SEQ ID NO: 1357 - DNA, 16 bp, synthetic construct
  misc_feature 1..16: note = Description of Artificial Sequence: Syntheticoligonucleotide
  source 1..16: mol_type = other DNA
tggagatgatctgtct

SEQ ID NO: 1358 - DNA, 16 bp, synthetic construct
  misc_feature 1..16: note = Description of Artificial Sequence: Syntheticoligonucleotide
  source 1..16: mol_type = other DNA
cgatttcggtgcaaat

SEQ ID NO: 1359 - DNA, 16 bp, synthetic construct
  misc_feature 1..16: note = Description of Artificial Sequence: Syntheticoligonucleotide
  source 1..16: mol_type = other DNA
agttcttagtctcctg

SEQ ID NO: 1360 - DNA, 16 bp, synthetic construct
  misc_feature 1..16: note = Description of Artificial Sequence: Syntheticoligonucleotide
  source 1..16: mol_type = other DNA
ttgagaactccacttc

SEQ ID NO: 1361 - DNA, 16 bp, synthetic construct
  misc_feature 1..16: note = Description of Artificial Sequence: Syntheticoligonucleotide
  source 1..16: mol_type = other DNA
ccctccacaatggctc

SEQ ID NO: 1362 - DNA, 16 bp, synthetic construct
  misc_feature 1..16: note = Description of Artificial Sequence: Syntheticoligonucleotide
  source 1..16: mol_type = other DNA
ccagcatggcaagtga

SEQ ID NO: 1363 - DNA, 16 bp, synthetic construct
  misc_feature 1..16: note = Description of Artificial Sequence: Syntheticoligonucleotide
  source 1..16: mol_type = other DNA
catgaagagtctggca

SEQ ID NO: 1364 - DNA, 16 bp, synthetic construct
  misc_feature 1..16: note = Description of Artificial Sequence: Syntheticoligonucleotide
  source 1..16: mol_type = other DNA
gggttttagcttgagc

SEQ ID NO: 1365 - DNA, 16 bp, synthetic construct
  misc_feature 1..16: note = Description of Artificial Sequence: Syntheticoligonucleotide
  source 1..16: mol_type = other DNA
ggctattgtaacagtc

SEQ ID NO: 1366 - DNA, 16 bp, synthetic construct
  misc_feature 1..16: note = Description of Artificial Sequence: Syntheticoligonucleotide
  source 1..16: mol_type = other DNA
gggcaatggttgtttc

SEQ ID NO: 1367 - DNA, 16 bp, synthetic construct
  misc_feature 1..16: note = Description of Artificial Sequence: Syntheticoligonucleotide
  source 1..16: mol_type = other DNA
ggcattggctgggaca

SEQ ID NO: 1368 - DNA, 16 bp, synthetic construct
  misc_feature 1..16: note = Description of Artificial Sequence: Syntheticoligonucleotide
  source 1..16: mol_type = other DNA
tgccacagtaaaggtc

SEQ ID NO: 1369 - DNA, 16 bp, synthetic construct
  misc_feature 1..16: note = Description of Artificial Sequence: Syntheticoligonucleotide
  source 1..16: mol_type = other DNA
agatcgagtaactttt

SEQ ID NO: 1370 - DNA, 16 bp, synthetic construct
  misc_feature 1..16: note = Description of Artificial Sequence: Syntheticoligonucleotide
  source 1..16: mol_type = other DNA
tacctggtgcatgaaa

SEQ ID NO: 1371 - DNA, 16 bp, synthetic construct
  misc_feature 1..16: note = Description of Artificial Sequence: Syntheticoligonucleotide
  source 1..16: mol_type = other DNA
gcaattcagaatagcc

SEQ ID NO: 1372 - DNA, 16 bp, synthetic construct
  misc_feature 1..16: note = Description of Artificial Sequence: Syntheticoligonucleotide
  source 1..16: mol_type = other DNA
ctgacattttgactag

SEQ ID NO: 1373 - DNA, 16 bp, synthetic construct
  misc_feature 1..16: note = Description of Artificial Sequence: Syntheticoligonucleotide
  source 1..16: mol_type = other DNA
acaaggcctctcattt

SEQ ID NO: 1374 - DNA, 16 bp, synthetic construct
  misc_feature 1..16: note = Description of Artificial Sequence: Syntheticoligonucleotide
  source 1..16: mol_type = other DNA
gccagtcagggatgga

SEQ ID NO: 1375 - DNA, 16 bp, synthetic construct
  misc_feature 1..16: note = Description of Artificial Sequence: Syntheticoligonucleotide
  source 1..16: mol_type = other DNA
tggaataaggctggca

SEQ ID NO: 1376 - DNA, 16 bp, synthetic construct
  misc_feature 1..16: note = Description of Artificial Sequence: Syntheticoligonucleotide
  source 1..16: mol_type = other DNA
cttgagcctggccaga

SEQ ID NO: 1377 - DNA, 16 bp, synthetic construct
  misc_feature 1..16: note = Description of Artificial Sequence: Syntheticoligonucleotide
  source 1..16: mol_type = other DNA
gcactatccctatccc

SEQ ID NO: 1378 - DNA, 16 bp, synthetic construct
  misc_feature 1..16: note = Description of Artificial Sequence: Syntheticoligonucleotide
  source 1..16: mol_type = other DNA
ctcaccacagatgaag

SEQ ID NO: 1379 - DNA, 16 bp, synthetic construct
  misc_feature 1..16: note = Description of Artificial Sequence: Syntheticoligonucleotide
  source 1..16: mol_type = other DNA
tttaacaactcaggat

SEQ ID NO: 1380 - DNA, 16 bp, synthetic construct
  misc_feature 1..16: note = Description of Artificial Sequence: Syntheticoligonucleotide
  source 1..16: mol_type = other DNA
gaaagtcacctaaacc

SEQ ID NO: 1381 - DNA, 16 bp, synthetic construct
  misc_feature 1..16: note = Description of Artificial Sequence: Syntheticoligonucleotide
  source 1..16: mol_type = other DNA
tcttacctgggaatgt

SEQ ID NO: 1382 - DNA, 16 bp, synthetic construct
  misc_feature 1..16: note = Description of Artificial Sequence: Syntheticoligonucleotide
  source 1..16: mol_type = other DNA
agcttttgtgagcgga

SEQ ID NO: 1383 - DNA, 16 bp, synthetic construct
  misc_feature 1..16: note = Description of Artificial Sequence: Syntheticoligonucleotide
  source 1..16: mol_type = other DNA
ccgaatatagtagctg

SEQ ID NO: 1384 - DNA, 16 bp, synthetic construct
  misc_feature 1..16: note = Description of Artificial Sequence: Syntheticoligonucleotide
  source 1..16: mol_type = other DNA
gaatccaccccgattt

SEQ ID NO: 1385 - DNA, 16 bp, synthetic construct
  misc_feature 1..16: note = Description of Artificial Sequence: Syntheticoligonucleotide
  source 1..16: mol_type = other DNA
gatgcaagaggttaaa

SEQ ID NO: 1386 - DNA, 16 bp, synthetic construct
  misc_feature 1..16: note = Description of Artificial Sequence: Syntheticoligonucleotide
  source 1..16: mol_type = other DNA
gacataagttgtatca

SEQ ID NO: 1387 - DNA, 16 bp, synthetic construct
  misc_feature 1..16: note = Description of Artificial Sequence: Syntheticoligonucleotide
  source 1..16: mol_type = other DNA
gagtctacaggcctga

SEQ ID NO: 1388 - DNA, 16 bp, synthetic construct
  misc_feature 1..16: note = Description of Artificial Sequence: Syntheticoligonucleotide
  source 1..16: mol_type = other DNA
ggaggaactctgtcag

SEQ ID NO: 1389 - DNA, 16 bp, synthetic construct
  misc_feature 1..16: note = Description of Artificial Sequence: Syntheticoligonucleotide
  source 1..16: mol_type = other DNA
agaatttggcatgctc

SEQ ID NO: 1390 - DNA, 16 bp, synthetic construct
  misc_feature 1..16: note = Description of Artificial Sequence: Syntheticoligonucleotide
  source 1..16: mol_type = other DNA
ggagttagagtaagag

SEQ ID NO: 1391 - DNA, 16 bp, synthetic construct
  misc_feature 1..16: note = Description of Artificial Sequence: Syntheticoligonucleotide
  source 1..16: mol_type = other DNA
aggatgaaggttctga

SEQ ID NO: 1392 - DNA, 16 bp, synthetic construct
  misc_feature 1..16: note = Description of Artificial Sequence: Syntheticoligonucleotide
  source 1..16: mol_type = other DNA
ttcggtgtggagtgag

SEQ ID NO: 1393 - DNA, 16 bp, synthetic construct
  misc_feature 1..16: note = Description of Artificial Sequence: Syntheticoligonucleotide
  source 1..16: mol_type = other DNA
ggttaagagtcaggct

SEQ ID NO: 1394 - DNA, 16 bp, synthetic construct
  misc_feature 1..16: note = Description of Artificial Sequence: Syntheticoligonucleotide
  source 1..16: mol_type = other DNA
tgtgggtatggttgtt

SEQ ID NO: 1395 - DNA, 16 bp, synthetic construct
  misc_feature 1..16: note = Description of Artificial Sequence: Syntheticoligonucleotide
  source 1..16: mol_type = other DNA
tacggtgtggaagccg

SEQ ID NO: 1396 - DNA, 16 bp, synthetic construct
  misc_feature 1..16: note = Description of Artificial Sequence: Syntheticoligonucleotide
  source 1..16: mol_type = other DNA
tcgggtccttgtccaa

SEQ ID NO: 1397 - DNA, 16 bp, synthetic construct
  misc_feature 1..16: note = Description of Artificial Sequence: Syntheticoligonucleotide
  source 1..16: mol_type = other DNA
gcctcgaagatctcgg

SEQ ID NO: 1398 - DNA, 16 bp, synthetic construct
  misc_feature 1..16: note = Description of Artificial Sequence: Syntheticoligonucleotide
  source 1..16: mol_type = other DNA
ctggtgcatgaaatgt

SEQ ID NO: 1399 - DNA, 16 bp, synthetic construct
  misc_feature 1..16: note = Description of Artificial Sequence: Syntheticoligonucleotide
  source 1..16: mol_type = other DNA
ccggctccctggacac

SEQ ID NO: 1400 - DNA, 16 bp, synthetic construct
  misc_feature 1..16: note = Description of Artificial Sequence: Syntheticoligonucleotide
  source 1..16: mol_type = other DNA
cctctggctcttcgaa

SEQ ID NO: 1401 - DNA, 16 bp, synthetic construct
  misc_feature 1..16: note = Description of Artificial Sequence: Syntheticoligonucleotide
  source 1..16: mol_type = other DNA
cagatgaagccttggt

SEQ ID NO: 1402 - DNA, 16 bp, synthetic construct
  misc_feature 1..16: note = Description of Artificial Sequence: Syntheticoligonucleotide
  source 1..16: mol_type = other DNA
gctaccccacaggtgc

SEQ ID NO: 1403 - DNA, 16 bp, synthetic construct
  misc_feature 1..16: note = Description of Artificial Sequence: Syntheticoligonucleotide
  source 1..16: mol_type = other DNA
gtggcaggatggtttc

SEQ ID NO: 1404 - DNA, 16 bp, synthetic construct
  misc_feature 1..16: note = Description of Artificial Sequence: Syntheticoligonucleotide
  source 1..16: mol_type = other DNA
cttgatcttgaggtca

SEQ ID NO: 1405 - DNA, 16 bp, synthetic construct
  misc_feature 1..16: note = Description of Artificial Sequence: Syntheticoligonucleotide
  source 1..16: mol_type = other DNA
ggctggttgtgaaggc

SEQ ID NO: 1406 - DNA, 16 bp, synthetic construct
  misc_feature 1..16: note = Description of Artificial Sequence: Syntheticoligonucleotide
  source 1..16: mol_type = other DNA
ttgtttgagtgtactg

SEQ ID NO: 1407 - DNA, 16 bp, synthetic construct
  misc_feature 1..16: note = Description of Artificial Sequence: Syntheticoligonucleotide
  source 1..16: mol_type = other DNA
gggacctcagatcctg

SEQ ID NO: 1408 - DNA, 16 bp, synthetic construct
  misc_feature 1..16: note = Description of Artificial Sequence: Syntheticoligonucleotide
  source 1..16: mol_type = other DNA
agtctaagctgaggca

SEQ ID NO: 1409 - DNA, 16 bp, synthetic construct
  misc_feature 1..16: note = Description of Artificial Sequence: Syntheticoligonucleotide
  source 1..16: mol_type = other DNA
taggagggcgaggatc

SEQ ID NO: 1410 - DNA, 16 bp, synthetic construct
  misc_feature 1..16: note = Description of Artificial Sequence: Syntheticoligonucleotide
  source 1..16: mol_type = other DNA
ccccaatgtgcctatg

SEQ ID NO: 1411 - DNA, 16 bp, synthetic construct
  misc_feature 1..16: note = Description of Artificial Sequence: Syntheticoligonucleotide
  source 1..16: mol_type = other DNA
accagagggcccctga

SEQ ID NO: 1412 - DNA, 16 bp, synthetic construct
  misc_feature 1..16: note = Description of Artificial Sequence: Syntheticoligonucleotide
  source 1..16: mol_type = other DNA
aagtacttcaccttta

SEQ ID NO: 1413 - DNA, 16 bp, synthetic construct
  misc_feature 1..16: note = Description of Artificial Sequence: Syntheticoligonucleotide
  source 1..16: mol_type = other DNA
cgggagaaagagaggc

SEQ ID NO: 1414 - DNA, 16 bp, synthetic construct
  misc_feature 1..16: note = Description of Artificial Sequence: Syntheticoligonucleotide
  source 1..16: mol_type = other DNA
ctctaggctggatgct

SEQ ID NO: 1415 - DNA, 16 bp, synthetic construct
  misc_feature 1..16: note = Description of Artificial Sequence: Syntheticoligonucleotide
  source 1..16: mol_type = other DNA
tgcaatcctcctgcta

SEQ ID NO: 1416 - DNA, 16 bp, synthetic construct
  misc_feature 1..16: note = Description of Artificial Sequence: Syntheticoligonucleotide
  source 1..16: mol_type = other DNA
aaactacggttgacaa

SEQ ID NO: 1417 - DNA, 16 bp, synthetic construct
  misc_feature 1..16: note = Description of Artificial Sequence: Syntheticoligonucleotide
  source 1..16: mol_type = other DNA
gcatgattctaatttg

SEQ ID NO: 1418 - DNA, 16 bp, synthetic construct
  misc_feature 1..16: note = Description of Artificial Sequence: Syntheticoligonucleotide
  source 1..16: mol_type = other DNA
tccaaggaagcagtca

SEQ ID NO: 1419 - DNA, 16 bp, synthetic construct
  misc_feature 1..16: note = Description of Artificial Sequence: Syntheticoligonucleotide
  source 1..16: mol_type = other DNA
actcacctagggttag

SEQ ID NO: 1420 - DNA, 16 bp, synthetic construct
  misc_feature 1..16: note = Description of Artificial Sequence: Syntheticoligonucleotide
  source 1..16: mol_type = other DNA
aataagatgaacaccc

SEQ ID NO: 1421 - DNA, 16 bp, synthetic construct
  misc_feature 1..16: note = Description of Artificial Sequence: Syntheticoligonucleotide
  source 1..16: mol_type = other DNA
ggactttctaagcaca

SEQ ID NO: 1422 - DNA, 16 bp, synthetic construct
  misc_feature 1..16: note = Description of Artificial Sequence: Syntheticoligonucleotide
  source 1..16: mol_type = other DNA
cgctgggtttgtccca

SEQ ID NO: 1423 - DNA, 16 bp, synthetic construct
  misc_feature 1..16: note = Description of Artificial Sequence: Syntheticoligonucleotide
  source 1..16: mol_type = other DNA
gttttaacacctaatg

SEQ ID NO: 1424 - DNA, 16 bp, synthetic construct
  misc_feature 1..16: note = Description of Artificial Sequence: Syntheticoligonucleotide
  source 1..16: mol_type = other DNA
ggagtatggtttaaca

SEQ ID NO: 1425 - DNA, 16 bp, synthetic construct
  misc_feature 1..16: note = Description of Artificial Sequence: Syntheticoligonucleotide
  source 1..16: mol_type = other DNA
cccatggctgggtatt

SEQ ID NO: 1426 - DNA, 16 bp, synthetic construct
  misc_feature 1..16: note = Description of Artificial Sequence: Syntheticoligonucleotide
  source 1..16: mol_type = other DNA
gggatacatagagaca

SEQ ID NO: 1427 - DNA, 16 bp, synthetic construct
  misc_feature 1..16: note = Description of Artificial Sequence: Syntheticoligonucleotide
  source 1..16: mol_type = other DNA
ggccagggcccttcta

SEQ ID NO: 1428 - DNA, 16 bp, synthetic construct
  misc_feature 1..16: note = Description of Artificial Sequence: Syntheticoligonucleotide
  source 1..16: mol_type = other DNA
gaatggtagcccaggt

SEQ ID NO: 1429 - DNA, 16 bp, synthetic construct
  misc_feature 1..16: note = Description of Artificial Sequence: Syntheticoligonucleotide
  source 1..16: mol_type = other DNA
caatacagagcccatc

SEQ ID NO: 1430 - DNA, 16 bp, synthetic construct
  misc_feature 1..16: note = Description of Artificial Sequence: Syntheticoligonucleotide
  source 1..16: mol_type = other DNA
tgaaagtcaggcagct

SEQ ID NO: 1431 - DNA, 16 bp, synthetic construct
  misc_feature 1..16: note = Description of Artificial Sequence: Syntheticoligonucleotide
  source 1..16: mol_type = other DNA
ccacagatactgggac

SEQ ID NO: 1432 - DNA, 16 bp, synthetic construct
  misc_feature 1..16: note = Description of Artificial Sequence: Syntheticoligonucleotide
  source 1..16: mol_type = other DNA
ggcagataccccaccc

SEQ ID NO: 1433 - DNA, 16 bp, synthetic construct
  misc_feature 1..16: note = Description of Artificial Sequence: Syntheticoligonucleotide
  source 1..16: mol_type = other DNA
cgacttgcccagattt

SEQ ID NO: 1434 - DNA, 16 bp, synthetic construct
  misc_feature 1..16: note = Description of Artificial Sequence: Syntheticoligonucleotide
  source 1..16: mol_type = other DNA
catagatacattctca

SEQ ID NO: 1435 - DNA, 16 bp, synthetic construct
  misc_feature 1..16: note = Description of Artificial Sequence: Syntheticoligonucleotide
  source 1..16: mol_type = other DNA
accgatttcggtgcaa

SEQ ID NO: 1436 - DNA, 16 bp, synthetic construct
  misc_feature 1..16: note = Description of Artificial Sequence: Syntheticoligonucleotide
  source 1..16: mol_type = other DNA
aagttcttagtctcct

SEQ ID NO: 1437 - DNA, 16 bp, synthetic construct
  misc_feature 1..16: note = Description of Artificial Sequence: Syntheticoligonucleotide
  source 1..16: mol_type = other DNA
cttgagaactccactt

SEQ ID NO: 1438 - DNA, 16 bp, synthetic construct
  misc_feature 1..16: note = Description of Artificial Sequence: Syntheticoligonucleotide
  source 1..16: mol_type = other DNA
aagccctccacaatgg

SEQ ID NO: 1439 - DNA, 16 bp, synthetic construct
  misc_feature 1..16: note = Description of Artificial Sequence: Syntheticoligonucleotide
  source 1..16: mol_type = other DNA
tccagcatggcaagtg

SEQ ID NO: 1440 - DNA, 16 bp, synthetic construct
  misc_feature 1..16: note = Description of Artificial Sequence: Syntheticoligonucleotide
  source 1..16: mol_type = other DNA
acatgaagagtctggc

SEQ ID NO: 1441 - DNA, 16 bp, synthetic construct
  misc_feature 1..16: note = Description of Artificial Sequence: Syntheticoligonucleotide
  source 1..16: mol_type = other DNA
atgggttttagcttga

SEQ ID NO: 1442 - DNA, 16 bp, synthetic construct
  misc_feature 1..16: note = Description of Artificial Sequence: Syntheticoligonucleotide
  source 1..16: mol_type = other DNA
aggctattgtaacagt

SEQ ID NO: 1443 - DNA, 16 bp, synthetic construct
  misc_feature 1..16: note = Description of Artificial Sequence: Syntheticoligonucleotide
  source 1..16: mol_type = other DNA
agggcaatggttgttt

SEQ ID NO: 1444 - DNA, 16 bp, synthetic construct
  misc_feature 1..16: note = Description of Artificial Sequence: Syntheticoligonucleotide
  source 1..16: mol_type = other DNA
ggtcaaagcaggcatt

SEQ ID NO: 1445 - DNA, 16 bp, synthetic construct
  misc_feature 1..16: note = Description of Artificial Sequence: Syntheticoligonucleotide
  source 1..16: mol_type = other DNA
cccgcccagtgccaca

SEQ ID NO: 1446 - DNA, 16 bp, synthetic construct
  misc_feature 1..16: note = Description of Artificial Sequence: Syntheticoligonucleotide
  source 1..16: mol_type = other DNA
gagatcgagtaacttt

SEQ ID NO: 1447 - DNA, 16 bp, synthetic construct
  misc_feature 1..16: note = Description of Artificial Sequence: Syntheticoligonucleotide
  source 1..16: mol_type = other DNA
atacctggtgcatgaa

SEQ ID NO: 1448 - DNA, 16 bp, synthetic construct
  misc_feature 1..16: note = Description of Artificial Sequence: Syntheticoligonucleotide
  source 1..16: mol_type = other DNA
tgcaattcagaatagc

SEQ ID NO: 1449 - DNA, 16 bp, synthetic construct
  misc_feature 1..16: note = Description of Artificial Sequence: Syntheticoligonucleotide
  source 1..16: mol_type = other DNA
gctgacattttgacta

SEQ ID NO: 1450 - DNA, 16 bp, synthetic construct
  misc_feature 1..16: note = Description of Artificial Sequence: Syntheticoligonucleotide
  source 1..16: mol_type = other DNA
cacaaggcctctcatt

SEQ ID NO: 1451 - DNA, 16 bp, synthetic construct
  misc_feature 1..16: note = Description of Artificial Sequence: Syntheticoligonucleotide
  source 1..16: mol_type = other DNA
cgagagaagctaagta

SEQ ID NO: 1452 - DNA, 16 bp, synthetic construct
  misc_feature 1..16: note = Description of Artificial Sequence: Syntheticoligonucleotide
  source 1..16: mol_type = other DNA
gtggaataaggctggc

SEQ ID NO: 1453 - DNA, 16 bp, synthetic construct
  misc_feature 1..16: note = Description of Artificial Sequence: Syntheticoligonucleotide
  source 1..16: mol_type = other DNA
ctcaccacttgagcct

SEQ ID NO: 1454 - DNA, 16 bp, synthetic construct
  misc_feature 1..16: note = Description of Artificial Sequence: Syntheticoligonucleotide
  source 1..16: mol_type = other DNA
gcgcactatccctatc

SEQ ID NO: 1455 - DNA, 16 bp, synthetic construct
  misc_feature 1..16: note = Description of Artificial Sequence: Syntheticoligonucleotide
  source 1..16: mol_type = other DNA
gctcaccacagatgaa

SEQ ID NO: 1456 - DNA, 16 bp, synthetic construct
  misc_feature 1..16: note = Description of Artificial Sequence: Syntheticoligonucleotide
  source 1..16: mol_type = other DNA
ctttaacaactcagga

SEQ ID NO: 1457 - DNA, 16 bp, synthetic construct
  misc_feature 1..16: note = Description of Artificial Sequence: Syntheticoligonucleotide
  source 1..16: mol_type = other DNA
ctctttaccacccaac

SEQ ID NO: 1458 - DNA, 16 bp, synthetic construct
  misc_feature 1..16: note = Description of Artificial Sequence: Syntheticoligonucleotide
  source 1..16: mol_type = other DNA
attcttacctgggaat

SEQ ID NO: 1459 - DNA, 16 bp, synthetic construct
  misc_feature 1..16: note = Description of Artificial Sequence: Syntheticoligonucleotide
  source 1..16: mol_type = other DNA
aagcttttgtgagcgg

SEQ ID NO: 1460 - DNA, 16 bp, synthetic construct
  misc_feature 1..16: note = Description of Artificial Sequence: Syntheticoligonucleotide
  source 1..16: mol_type = other DNA
gccgaatatagtagct

SEQ ID NO: 1461 - DNA, 16 bp, synthetic construct
  misc_feature 1..16: note = Description of Artificial Sequence: Syntheticoligonucleotide
  source 1..16: mol_type = other DNA
cgaatccaccccgatt

SEQ ID NO: 1462 - DNA, 16 bp, synthetic construct
  misc_feature 1..16: note = Description of Artificial Sequence: Syntheticoligonucleotide
  source 1..16: mol_type = other DNA
aggatgcaagaggtta

SEQ ID NO: 1463 - DNA, 16 bp, synthetic construct
  misc_feature 1..16: note = Description of Artificial Sequence: Syntheticoligonucleotide
  source 1..16: mol_type = other DNA
ctgacataagttgtat

SEQ ID NO: 1464 - DNA, 16 bp, synthetic construct
  misc_feature 1..16: note = Description of Artificial Sequence: Syntheticoligonucleotide
  source 1..16: mol_type = other DNA
gtgagtctacaggcct

SEQ ID NO: 1465 - DNA, 16 bp, synthetic construct
  misc_feature 1..16: note = Description of Artificial Sequence: Syntheticoligonucleotide
  source 1..16: mol_type = other DNA
gtggaggaactctgtc

SEQ ID NO: 1466 - DNA, 16 bp, synthetic construct
  misc_feature 1..16: note = Description of Artificial Sequence: Syntheticoligonucleotide
  source 1..16: mol_type = other DNA
tcagaatttggcatgc

SEQ ID NO: 1467 - DNA, 16 bp, synthetic construct
  misc_feature 1..16: note = Description of Artificial Sequence: Syntheticoligonucleotide
  source 1..16: mol_type = other DNA
aggagttagagtaaga

SEQ ID NO: 1468 - DNA, 16 bp, synthetic construct
  misc_feature 1..16: note = Description of Artificial Sequence: Syntheticoligonucleotide
  source 1..16: mol_type = other DNA
taggatgaaggttctg

SEQ ID NO: 1469 - DNA, 16 bp, synthetic construct
  misc_feature 1..16: note = Description of Artificial Sequence: Syntheticoligonucleotide
  source 1..16: mol_type = other DNA
gttcggtgtggagtga

SEQ ID NO: 1470 - DNA, 16 bp, synthetic construct
  misc_feature 1..16: note = Description of Artificial Sequence: Syntheticoligonucleotide
  source 1..16: mol_type = other DNA
gggttaagagtcaggc

SEQ ID NO: 1471 - DNA, 16 bp, synthetic construct
  misc_feature 1..16: note = Description of Artificial Sequence: Syntheticoligonucleotide
  source 1..16: mol_type = other DNA
gtgtgggtatggttgt

SEQ ID NO: 1472 - DNA, 16 bp, synthetic construct
  misc_feature 1..16: note = Description of Artificial Sequence: Syntheticoligonucleotide
  source 1..16: mol_type = other DNA
gtacggtgtggaagcc

SEQ ID NO: 1473 - DNA, 16 bp, synthetic construct
  misc_feature 1..16: note = Description of Artificial Sequence: Syntheticoligonucleotide
  source 1..16: mol_type = other DNA
atcgggtccttgtcca

SEQ ID NO: 1474 - DNA, 16 bp, synthetic construct
  misc_feature 1..16: note = Description of Artificial Sequence: Syntheticoligonucleotide
  source 1..16: mol_type = other DNA
cgcctcgaagatctcg

SEQ ID NO: 1475 - DNA, 16 bp, synthetic construct
  misc_feature 1..16: note = Description of Artificial Sequence: Syntheticoligonucleotide
  source 1..16: mol_type = other DNA
agctggtgcatgaaat

SEQ ID NO: 1476 - DNA, 16 bp, synthetic construct
  misc_feature 1..16: note = Description of Artificial Sequence: Syntheticoligonucleotide
  source 1..16: mol_type = other DNA
gccggctccctggaca

SEQ ID NO: 1477 - DNA, 16 bp, synthetic construct
  misc_feature 1..16: note = Description of Artificial Sequence: Syntheticoligonucleotide
  source 1..16: mol_type = other DNA
tcctctggctcttcga

SEQ ID NO: 1478 - DNA, 16 bp, synthetic construct
  misc_feature 1..16: note = Description of Artificial Sequence: Syntheticoligonucleotide
  source 1..16: mol_type = other DNA
cggatgatgccacaga

SEQ ID NO: 1479 - DNA, 16 bp, synthetic construct
  misc_feature 1..16: note = Description of Artificial Sequence: Syntheticoligonucleotide
  source 1..16: mol_type = other DNA
tggctaccccacaggt

SEQ ID NO: 1480 - DNA, 16 bp, synthetic construct
  misc_feature 1..16: note = Description of Artificial Sequence: Syntheticoligonucleotide
  source 1..16: mol_type = other DNA
cacccgcacaaagcac

SEQ ID NO: 1481 - DNA, 16 bp, synthetic construct
  misc_feature 1..16: note = Description of Artificial Sequence: Syntheticoligonucleotide
  source 1..16: mol_type = other DNA
tccttgatcttgaggt

SEQ ID NO: 1482 - DNA, 16 bp, synthetic construct
  misc_feature 1..16: note = Description of Artificial Sequence: Syntheticoligonucleotide
  source 1..16: mol_type = other DNA
gcgagcagctgaggca

SEQ ID NO: 1483 - DNA, 16 bp, synthetic construct
  misc_feature 1..16: note = Description of Artificial Sequence: Syntheticoligonucleotide
  source 1..16: mol_type = other DNA
ggttgtttgagtgtac

SEQ ID NO: 1484 - DNA, 16 bp, synthetic construct
  misc_feature 1..16: note = Description of Artificial Sequence: Syntheticoligonucleotide
  source 1..16: mol_type = other DNA
tgggacctcagatcct

SEQ ID NO: 1485 - DNA, 16 bp, synthetic construct
  misc_feature 1..16: note = Description of Artificial Sequence: Syntheticoligonucleotide
  source 1..16: mol_type = other DNA
cagtctaagctgaggc

SEQ ID NO: 1486 - DNA, 16 bp, synthetic construct
  misc_feature 1..16: note = Description of Artificial Sequence: Syntheticoligonucleotide
  source 1..16: mol_type = other DNA
ataggagggcgaggat

SEQ ID NO: 1487 - DNA, 16 bp, synthetic construct
  misc_feature 1..16: note = Description of Artificial Sequence: Syntheticoligonucleotide
  source 1..16: mol_type = other DNA
tccccaatgtgcctat

SEQ ID NO: 1488 - DNA, 16 bp, synthetic construct
  misc_feature 1..16: note = Description of Artificial Sequence: Syntheticoligonucleotide
  source 1..16: mol_type = other DNA
taccagagggcccctg

SEQ ID NO: 1489 - DNA, 16 bp, synthetic construct
  misc_feature 1..16: note = Description of Artificial Sequence: Syntheticoligonucleotide
  source 1..16: mol_type = other DNA
ttaagtacttcacctt

SEQ ID NO: 1490 - DNA, 16 bp, synthetic construct
  misc_feature 1..16: note = Description of Artificial Sequence: Syntheticoligonucleotide
  source 1..16: mol_type = other DNA
atggcgggagaaagag

SEQ ID NO: 1491 - DNA, 16 bp, synthetic construct
  misc_feature 1..16: note = Description of Artificial Sequence: Syntheticoligonucleotide
  source 1..16: mol_type = other DNA
gctctaggctggatgc

SEQ ID NO: 1492 - DNA, 16 bp, synthetic construct
  misc_feature 1..16: note = Description of Artificial Sequence: Syntheticoligonucleotide
  source 1..16: mol_type = other DNA
ggcaccttgcaatcct

SEQ ID NO: 1493 - DNA, 16 bp, synthetic construct
  misc_feature 1..16: note = Description of Artificial Sequence: Syntheticoligonucleotide
  source 1..16: mol_type = other DNA
taaactacggttgaca

SEQ ID NO: 1494 - DNA, 16 bp, synthetic construct
  misc_feature 1..16: note = Description of Artificial Sequence: Syntheticoligonucleotide
  source 1..16: mol_type = other DNA
ccaatatatagcatga

SEQ ID NO: 1495 - DNA, 16 bp, synthetic construct
  misc_feature 1..16: note = Description of Artificial Sequence: Syntheticoligonucleotide
  source 1..16: mol_type = other DNA
atccaaggaagcagtc

SEQ ID NO: 1496 - DNA, 16 bp, synthetic construct
  misc_feature 1..16: note = Description of Artificial Sequence: Syntheticoligonucleotide
  source 1..16: mol_type = other DNA
aatactcacctagggt

SEQ ID NO: 1497 - DNA, 16 bp, synthetic construct
  misc_feature 1..16: note = Description of Artificial Sequence: Syntheticoligonucleotide
  source 1..16: mol_type = other DNA
gcaaatcaataaggga

SEQ ID NO: 1498 - DNA, 16 bp, synthetic construct
  misc_feature 1..16: note = Description of Artificial Sequence: Syntheticoligonucleotide
  source 1..16: mol_type = other DNA
gtaggaaaggactttc

SEQ ID NO: 1499 - DNA, 16 bp, synthetic construct
  misc_feature 1..16: note = Description of Artificial Sequence: Syntheticoligonucleotide
  source 1..16: mol_type = other DNA
cacacatagggcttgg

SEQ ID NO: 1500 - DNA, 16 bp, synthetic construct
  misc_feature 1..16: note = Description of Artificial Sequence: Syntheticoligonucleotide
  source 1..16: mol_type = other DNA
ataagttttaacacct

SEQ ID NO: 1501 - DNA, 16 bp, synthetic construct
  misc_feature 1..16: note = Description of Artificial Sequence: Syntheticoligonucleotide
  source 1..16: mol_type = other DNA
actggaggaccatgga

SEQ ID NO: 1502 - DNA, 16 bp, synthetic construct
  misc_feature 1..16: note = Description of Artificial Sequence: Syntheticoligonucleotide
  source 1..16: mol_type = other DNA
taaagaagggcaaggt

SEQ ID NO: 1503 - DNA, 16 bp, synthetic construct
  misc_feature 1..16: note = Description of Artificial Sequence: Syntheticoligonucleotide
  source 1..16: mol_type = other DNA
agggatacatagagac

SEQ ID NO: 1504 - DNA, 16 bp, synthetic construct
  misc_feature 1..16: note = Description of Artificial Sequence: Syntheticoligonucleotide
  source 1..16: mol_type = other DNA
gagtagacaagggcca

SEQ ID NO: 1505 - DNA, 16 bp, synthetic construct
  misc_feature 1..16: note = Description of Artificial Sequence: Syntheticoligonucleotide
  source 1..16: mol_type = other DNA
gtccaacctgtgggaa

SEQ ID NO: 1506 - DNA, 16 bp, synthetic construct
  misc_feature 1..16: note = Description of Artificial Sequence: Syntheticoligonucleotide
  source 1..16: mol_type = other DNA
ccaatacagagcccat

SEQ ID NO: 1507 - DNA, 16 bp, synthetic construct
  misc_feature 1..16: note = Description of Artificial Sequence: Syntheticoligonucleotide
  source 1..16: mol_type = other DNA
tccttggaaccatctg

SEQ ID NO: 1508 - DNA, 16 bp, synthetic construct
  misc_feature 1..16: note = Description of Artificial Sequence: Syntheticoligonucleotide
  source 1..16: mol_type = other DNA
ctccacagatactggg

SEQ ID NO: 1509 - DNA, 16 bp, synthetic construct
  misc_feature 1..16: note = Description of Artificial Sequence: Syntheticoligonucleotide
  source 1..16: mol_type = other DNA
gggcagataccccacc

SEQ ID NO: 1510 - DNA, 16 bp, synthetic construct
  misc_feature 1..16: note = Description of Artificial Sequence: Syntheticoligonucleotide
  source 1..16: mol_type = other DNA
cccgacttgcccagat

SEQ ID NO: 1511 - DNA, 16 bp, synthetic construct
  misc_feature 1..16: note = Description of Artificial Sequence: Syntheticoligonucleotide
  source 1..16: mol_type = other DNA
agcatagatacattct

SEQ ID NO: 1512 - DNA, 16 bp, synthetic construct
  misc_feature 1..16: note = Description of Artificial Sequence: Syntheticoligonucleotide
  source 1..16: mol_type = other DNA
taccgatttcggtgca

SEQ ID NO: 1513 - DNA, 16 bp, synthetic construct
  misc_feature 1..16: note = Description of Artificial Sequence: Syntheticoligonucleotide
  source 1..16: mol_type = other DNA
taagttcttagtctcc

SEQ ID NO: 1514 - DNA, 16 bp, synthetic construct
  misc_feature 1..16: note = Description of Artificial Sequence: Syntheticoligonucleotide
  source 1..16: mol_type = other DNA
acttgagaactccact

SEQ ID NO: 1515 - DNA, 16 bp, synthetic construct
  misc_feature 1..16: note = Description of Artificial Sequence: Syntheticoligonucleotide
  source 1..16: mol_type = other DNA
gaaagccctccacaat

SEQ ID NO: 1516 - DNA, 16 bp, synthetic construct
  misc_feature 1..16: note = Description of Artificial Sequence: Syntheticoligonucleotide
  source 1..16: mol_type = other DNA
atccagcatggcaagt

SEQ ID NO: 1517 - DNA, 16 bp, synthetic construct
  misc_feature 1..16: note = Description of Artificial Sequence: Syntheticoligonucleotide
  source 1..16: mol_type = other DNA
gacatgaagagtctgg

SEQ ID NO: 1518 - DNA, 16 bp, synthetic construct
  misc_feature 1..16: note = Description of Artificial Sequence: Syntheticoligonucleotide
  source 1..16: mol_type = other DNA
catgggttttagcttg

SEQ ID NO: 1519 - DNA, 16 bp, synthetic construct
  misc_feature 1..16: note = Description of Artificial Sequence: Syntheticoligonucleotide
  source 1..16: mol_type = other DNA
gaggctattgtaacag

SEQ ID NO: 1520 - DNA, 16 bp, synthetic construct
  misc_feature 1..16: note = Description of Artificial Sequence: Syntheticoligonucleotide
  source 1..16: mol_type = other DNA
gagggcaatggttgtt

SEQ ID NO: 1521 - DNA, 16 bp, synthetic construct
  misc_feature 1..16: note = Description of Artificial Sequence: Syntheticoligonucleotide
  source 1..16: mol_type = other DNA
ctcgaccacctgagcc

SEQ ID NO: 1522 - DNA, 16 bp, synthetic construct
  misc_feature 1..16: note = Description of Artificial Sequence: Syntheticoligonucleotide
  source 1..16: mol_type = other DNA
aaccacttcctgtgcc

SEQ ID NO: 1523 - DNA, 16 bp, synthetic construct
  misc_feature 1..16: note = Description of Artificial Sequence: Syntheticoligonucleotide
  source 1..16: mol_type = other DNA
ggagatcgagtaactt

SEQ ID NO: 1524 - DNA, 16 bp, synthetic construct
  misc_feature 1..16: note = Description of Artificial Sequence: Syntheticoligonucleotide
  source 1..16: mol_type = other DNA
catacctggtgcatga

SEQ ID NO: 1525 - DNA, 16 bp, synthetic construct
  misc_feature 1..16: note = Description of Artificial Sequence: Syntheticoligonucleotide
  source 1..16: mol_type = other DNA
ctgcaattcagaatag

SEQ ID NO: 1526 - DNA, 16 bp, synthetic construct
  misc_feature 1..16: note = Description of Artificial Sequence: Syntheticoligonucleotide
  source 1..16: mol_type = other DNA
cgcaggtgctgacatt

SEQ ID NO: 1527 - DNA, 16 bp, synthetic construct
  misc_feature 1..16: note = Description of Artificial Sequence: Syntheticoligonucleotide
  source 1..16: mol_type = other DNA
ccacaaggcctctcat

SEQ ID NO: 1528 - DNA, 16 bp, synthetic construct
  misc_feature 1..16: note = Description of Artificial Sequence: Syntheticoligonucleotide
  source 1..16: mol_type = other DNA
tcgagagaagctaagt

SEQ ID NO: 1529 - DNA, 16 bp, synthetic construct
  misc_feature 1..16: note = Description of Artificial Sequence: Syntheticoligonucleotide
  source 1..16: mol_type = other DNA
tgggaacagtggaata

SEQ ID NO: 1530 - DNA, 16 bp, synthetic construct
  misc_feature 1..16: note = Description of Artificial Sequence: Syntheticoligonucleotide
  source 1..16: mol_type = other DNA
actcaccacttgagcc

SEQ ID NO: 1531 - DNA, 16 bp, synthetic construct
  misc_feature 1..16: note = Description of Artificial Sequence: Syntheticoligonucleotide
  source 1..16: mol_type = other DNA
tgcgcactatccctat

SEQ ID NO: 1532 - DNA, 16 bp, synthetic construct
  misc_feature 1..16: note = Description of Artificial Sequence: Syntheticoligonucleotide
  source 1..16: mol_type = other DNA
gtcgctcaccacagat

SEQ ID NO: 1533 - DNA, 16 bp, synthetic construct
  misc_feature 1..16: note = Description of Artificial Sequence: Syntheticoligonucleotide
  source 1..16: mol_type = other DNA
ctggcaagtctggcta

SEQ ID NO: 1534 - DNA, 16 bp, synthetic construct
  misc_feature 1..16: note = Description of Artificial Sequence: Syntheticoligonucleotide
  source 1..16: mol_type = other DNA
gctctttaccacccaa

SEQ ID NO: 1535 - DNA, 16 bp, synthetic construct
  misc_feature 1..16: note = Description of Artificial Sequence: Syntheticoligonucleotide
  source 1..16: mol_type = other DNA
cattcttacctgggaa

SEQ ID NO: 1536 - DNA, 16 bp, synthetic construct
  misc_feature 1..16: note = Description of Artificial Sequence: Syntheticoligonucleotide
  source 1..16: mol_type = other DNA
ggaagcttttgtgagc

SEQ ID NO: 1537 - DNA, 16 bp, synthetic construct
  misc_feature 1..16: note = Description of Artificial Sequence: Syntheticoligonucleotide
  source 1..16: mol_type = other DNA
ggccgaatatagtagc

SEQ ID NO: 1538 - DNA, 16 bp, synthetic construct
  misc_feature 1..16: note = Description of Artificial Sequence: Syntheticoligonucleotide
  source 1..16: mol_type = other DNA
gcgaatccaccccgat

SEQ ID NO: 1539 - DNA, 16 bp, synthetic construct
  misc_feature 1..16: note = Description of Artificial Sequence: Syntheticoligonucleotide
  source 1..16: mol_type = other DNA
aaggatgcaagaggtt

SEQ ID NO: 1540 - DNA, 16 bp, synthetic construct
  misc_feature 1..16: note = Description of Artificial Sequence: Syntheticoligonucleotide
  source 1..16: mol_type = other DNA
cctgacataagttgta

SEQ ID NO: 1541 - DNA, 16 bp, synthetic construct
  misc_feature 1..16: note = Description of Artificial Sequence: Syntheticoligonucleotide
  source 1..16: mol_type = other DNA
acaaggtgagtctaca

SEQ ID NO: 1542 - DNA, 16 bp, synthetic construct
  misc_feature 1..16: note = Description of Artificial Sequence: Syntheticoligonucleotide
  source 1..16: mol_type = other DNA
acccagcggatgagcg

SEQ ID NO: 1543 - DNA, 16 bp, synthetic construct
  misc_feature 1..16: note = Description of Artificial Sequence: Syntheticoligonucleotide
  source 1..16: mol_type = other DNA
gtcagaatttggcatg

SEQ ID NO: 1544 - DNA, 16 bp, synthetic construct
  misc_feature 1..16: note = Description of Artificial Sequence: Syntheticoligonucleotide
  source 1..16: mol_type = other DNA
aaggagttagagtaag

SEQ ID NO: 1545 - DNA, 16 bp, synthetic construct
  misc_feature 1..16: note = Description of Artificial Sequence: Syntheticoligonucleotide
  source 1..16: mol_type = other DNA
ctaggatgaaggttct

SEQ ID NO: 1546 - DNA, 16 bp, synthetic construct
  misc_feature 1..16: note = Description of Artificial Sequence: Syntheticoligonucleotide
  source 1..16: mol_type = other DNA
ggttcggtgtggagtg

SEQ ID NO: 1547 - DNA, 16 bp, synthetic construct
  misc_feature 1..16: note = Description of Artificial Sequence: Syntheticoligonucleotide
  source 1..16: mol_type = other DNA
tgggttaagagtcagg

SEQ ID NO: 1548 - DNA, 16 bp, synthetic construct
  misc_feature 1..16: note = Description of Artificial Sequence: Syntheticoligonucleotide
  source 1..16: mol_type = other DNA
ggttagatgggtgtgg

SEQ ID NO: 1549 - DNA, 16 bp, synthetic construct
  misc_feature 1..16: note = Description of Artificial Sequence: Syntheticoligonucleotide
  source 1..16: mol_type = other DNA
tgtacggtgtggaagc

SEQ ID NO: 1550 - DNA, 16 bp, synthetic construct
  misc_feature 1..16: note = Description of Artificial Sequence: Syntheticoligonucleotide
  source 1..16: mol_type = other DNA
catcgggtccttgtcc

SEQ ID NO: 1551 - DNA, 16 bp, synthetic construct
  misc_feature 1..16: note = Description of Artificial Sequence: Syntheticoligonucleotide
  source 1..16: mol_type = other DNA
ccgcctcgaagatctc

SEQ ID NO: 1552 - DNA, 16 bp, synthetic construct
  misc_feature 1..16: note = Description of Artificial Sequence: Syntheticoligonucleotide
  source 1..16: mol_type = other DNA
tgagagctggtgcatg

SEQ ID NO: 1553 - DNA, 16 bp, synthetic construct
  misc_feature 1..16: note = Description of Artificial Sequence: Syntheticoligonucleotide
  source 1..16: mol_type = other DNA
gtgccggctccctgga

SEQ ID NO: 1554 - DNA, 16 bp, synthetic construct
  misc_feature 1..16: note = Description of Artificial Sequence: Syntheticoligonucleotide
  source 1..16: mol_type = other DNA
ggaagtcctctggctc

SEQ ID NO: 1555 - DNA, 16 bp, synthetic construct
  misc_feature 1..16: note = Description of Artificial Sequence: Syntheticoligonucleotide
  source 1..16: mol_type = other DNA
gtcggatgatgccaca

SEQ ID NO: 1556 - DNA, 16 bp, synthetic construct
  misc_feature 1..16: note = Description of Artificial Sequence: Syntheticoligonucleotide
  source 1..16: mol_type = other DNA
tccatggctaccccac

SEQ ID NO: 1557 - DNA, 16 bp, synthetic construct
  misc_feature 1..16: note = Description of Artificial Sequence: Syntheticoligonucleotide
  source 1..16: mol_type = other DNA
ccacccgcacaaagca

SEQ ID NO: 1558 - DNA, 16 bp, synthetic construct
  misc_feature 1..16: note = Description of Artificial Sequence: Syntheticoligonucleotide
  source 1..16: mol_type = other DNA
ttccttgatcttgagg

SEQ ID NO: 1559 - DNA, 16 bp, synthetic construct
  misc_feature 1..16: note = Description of Artificial Sequence: Syntheticoligonucleotide
  source 1..16: mol_type = other DNA
tgcgagcagctgaggc

SEQ ID NO: 1560 - DNA, 16 bp, synthetic construct
  misc_feature 1..16: note = Description of Artificial Sequence: Syntheticoligonucleotide
  source 1..16: mol_type = other DNA
aggttgtttgagtgta

SEQ ID NO: 1561 - DNA, 16 bp, synthetic construct
  misc_feature 1..16: note = Description of Artificial Sequence: Syntheticoligonucleotide
  source 1..16: mol_type = other DNA
ttgggacctcagatcc

SEQ ID NO: 1562 - DNA, 16 bp, synthetic construct
  misc_feature 1..16: note = Description of Artificial Sequence: Syntheticoligonucleotide
  source 1..16: mol_type = other DNA
gcagtctaagctgagg

SEQ ID NO: 1563 - DNA, 16 bp, synthetic construct
  misc_feature 1..16: note = Description of Artificial Sequence: Syntheticoligonucleotide
  source 1..16: mol_type = other DNA
gataggagggcgagga

SEQ ID NO: 1564 - DNA, 16 bp, synthetic construct
  misc_feature 1..16: note = Description of Artificial Sequence: Syntheticoligonucleotide
  source 1..16: mol_type = other DNA
ctccccaatgtgccta

SEQ ID NO: 1565 - DNA, 16 bp, synthetic construct
  misc_feature 1..16: note = Description of Artificial Sequence: Syntheticoligonucleotide
  source 1..16: mol_type = other DNA
gctgggtacatcccac

SEQ ID NO: 1566 - DNA, 16 bp, synthetic construct
  misc_feature 1..16: note = Description of Artificial Sequence: Syntheticoligonucleotide
  source 1..16: mol_type = other DNA
cattaagtacttcacc

SEQ ID NO: 1567 - DNA, 16 bp, synthetic construct
  misc_feature 1..16: note = Description of Artificial Sequence: Syntheticoligonucleotide
  source 1..16: mol_type = other DNA
gatggcgggagaaaga

SEQ ID NO: 1568 - DNA, 16 bp, synthetic construct
  misc_feature 1..16: note = Description of Artificial Sequence: Syntheticoligonucleotide
  source 1..16: mol_type = other DNA
agctctaggctggatg

SEQ ID NO: 1569 - DNA, 16 bp, synthetic construct
  misc_feature 1..16: note = Description of Artificial Sequence: Syntheticoligonucleotide
  source 1..16: mol_type = other DNA
cccggcaccttgcaat

SEQ ID NO: 1570 - DNA, 16 bp, synthetic construct
  misc_feature 1..16: note = Description of Artificial Sequence: Syntheticoligonucleotide
  source 1..16: mol_type = other DNA
ctaaactacggttgac

SEQ ID NO: 1571 - DNA, 16 bp, synthetic construct
  misc_feature 1..16: note = Description of Artificial Sequence: Syntheticoligonucleotide
  source 1..16: mol_type = other DNA
gttaattgaataaagc

SEQ ID NO: 1572 - DNA, 16 bp, synthetic construct
  misc_feature 1..16: note = Description of Artificial Sequence: Syntheticoligonucleotide
  source 1..16: mol_type = other DNA
cccttttcaggaatcc

SEQ ID NO: 1573 - DNA, 16 bp, synthetic construct
  misc_feature 1..16: note = Description of Artificial Sequence: Syntheticoligonucleotide
  source 1..16: mol_type = other DNA
taatactcacctaggg

SEQ ID NO: 1574 - DNA, 16 bp, synthetic construct
  misc_feature 1..16: note = Description of Artificial Sequence: Syntheticoligonucleotide
  source 1..16: mol_type = other DNA
tggcaaatcaataagg

SEQ ID NO: 1575 - DNA, 16 bp, synthetic construct
  misc_feature 1..16: note = Description of Artificial Sequence: Syntheticoligonucleotide
  source 1..16: mol_type = other DNA
caagtaggaaaggact

SEQ ID NO: 1576 - DNA, 16 bp, synthetic construct
  misc_feature 1..16: note = Description of Artificial Sequence: Syntheticoligonucleotide
  source 1..16: mol_type = other DNA
tcacacatagggcttg

SEQ ID NO: 1577 - DNA, 16 bp, synthetic construct
  misc_feature 1..16: note = Description of Artificial Sequence: Syntheticoligonucleotide
  source 1..16: mol_type = other DNA
ccattcaagatataag

SEQ ID NO: 1578 - DNA, 16 bp, synthetic construct
  misc_feature 1..16: note = Description of Artificial Sequence: Syntheticoligonucleotide
  source 1..16: mol_type = other DNA
aactggaggaccatgg

SEQ ID NO: 1579 - DNA, 16 bp, synthetic construct
  misc_feature 1..16: note = Description of Artificial Sequence: Syntheticoligonucleotide
  source 1..16: mol_type = other DNA
tcaactgatgctgcct

SEQ ID NO: 1580 - DNA, 16 bp, synthetic construct
  misc_feature 1..16: note = Description of Artificial Sequence: Syntheticoligonucleotide
  source 1..16: mol_type = other DNA
tagggatacatagaga

SEQ ID NO: 1581 - DNA, 16 bp, synthetic construct
  misc_feature 1..16: note = Description of Artificial Sequence: Syntheticoligonucleotide
  source 1..16: mol_type = other DNA
actgagcacggagagg

SEQ ID NO: 1582 - DNA, 16 bp, synthetic construct
  misc_feature 1..16: note = Description of Artificial Sequence: Syntheticoligonucleotide
  source 1..16: mol_type = other DNA
ccccacactgtgatcg

SEQ ID NO: 1583 - DNA, 16 bp, synthetic construct
  misc_feature 1..16: note = Description of Artificial Sequence: Syntheticoligonucleotide
  source 1..16: mol_type = other DNA
cgccaatacagagccc

SEQ ID NO: 1584 - DNA, 16 bp, synthetic construct
  misc_feature 1..16: note = Description of Artificial Sequence: Syntheticoligonucleotide
  source 1..16: mol_type = other DNA
ctccttggaaccatct

SEQ ID NO: 1585 - DNA, 16 bp, synthetic construct
  misc_feature 1..16: note = Description of Artificial Sequence: Syntheticoligonucleotide
  source 1..16: mol_type = other DNA
caggctccacagatac

SEQ ID NO: 1586 - DNA, 16 bp, synthetic construct
  misc_feature 1..16: note = Description of Artificial Sequence: Syntheticoligonucleotide
  source 1..16: mol_type = other DNA
agggcagataccccac

SEQ ID NO: 1587 - DNA, 16 bp, synthetic construct
  misc_feature 1..16: note = Description of Artificial Sequence: Syntheticoligonucleotide
  source 1..16: mol_type = other DNA
cccccgacttgcccag

SEQ ID NO: 1588 - DNA, 16 bp, synthetic construct
  misc_feature 1..16: note = Description of Artificial Sequence: Syntheticoligonucleotide
  source 1..16: mol_type = other DNA
aagcatagatacattc

SEQ ID NO: 1589 - DNA, 16 bp, synthetic construct
  misc_feature 1..16: note = Description of Artificial Sequence: Syntheticoligonucleotide
  source 1..16: mol_type = other DNA
ataccgatttcggtgc

SEQ ID NO: 1590 - DNA, 16 bp, synthetic construct
  misc_feature 1..16: note = Description of Artificial Sequence: Syntheticoligonucleotide
  source 1..16: mol_type = other DNA
ttaagttcttagtctc

SEQ ID NO: 1591 - DNA, 16 bp, synthetic construct
  misc_feature 1..16: note = Description of Artificial Sequence: Syntheticoligonucleotide
  source 1..16: mol_type = other DNA
gacttgagaactccac

SEQ ID NO: 1592 - DNA, 16 bp, synthetic construct
  misc_feature 1..16: note = Description of Artificial Sequence: Syntheticoligonucleotide
  source 1..16: mol_type = other DNA
ttgaaagccctccaca

SEQ ID NO: 1593 - DNA, 16 bp, synthetic construct
  misc_feature 1..16: note = Description of Artificial Sequence: Syntheticoligonucleotide
  source 1..16: mol_type = other DNA
acggatccagcatggc

SEQ ID NO: 1594 - DNA, 16 bp, synthetic construct
  misc_feature 1..16: note = Description of Artificial Sequence: Syntheticoligonucleotide
  source 1..16: mol_type = other DNA
agacatgaagagtctg

SEQ ID NO: 1595 - DNA, 16 bp, synthetic construct
  misc_feature 1..16: note = Description of Artificial Sequence: Syntheticoligonucleotide
  source 1..16: mol_type = other DNA
agtcaaagtgacatgg

SEQ ID NO: 1596 - DNA, 16 bp, synthetic construct
  misc_feature 1..16: note = Description of Artificial Sequence: Syntheticoligonucleotide
  source 1..16: mol_type = other DNA
aggaggctattgtaac

SEQ ID NO: 1597 - DNA, 16 bp, synthetic construct
  misc_feature 1..16: note = Description of Artificial Sequence: Syntheticoligonucleotide
  source 1..16: mol_type = other DNA
tgagggcaatggttgt

SEQ ID NO: 1598 - DNA, 16 bp, synthetic construct
  misc_feature 1..16: note = Description of Artificial Sequence: Syntheticoligonucleotide
  source 1..16: mol_type = other DNA
actcgaccacctgagc

SEQ ID NO: 1599 - DNA, 16 bp, synthetic construct
  misc_feature 1..16: note = Description of Artificial Sequence: Syntheticoligonucleotide
  source 1..16: mol_type = other DNA
acccagaaaccacttc

SEQ ID NO: 1600 - DNA, 16 bp, synthetic construct
  misc_feature 1..16: note = Description of Artificial Sequence: Syntheticoligonucleotide
  source 1..16: mol_type = other DNA
tggagatcgagtaact

SEQ ID NO: 1601 - DNA, 16 bp, synthetic construct
  misc_feature 1..16: note = Description of Artificial Sequence: Syntheticoligonucleotide
  source 1..16: mol_type = other DNA
ccatacctggtgcatg

SEQ ID NO: 1602 - DNA, 16 bp, synthetic construct
  misc_feature 1..16: note = Description of Artificial Sequence: Syntheticoligonucleotide
  source 1..16: mol_type = other DNA
cagagtactgcaattc

SEQ ID NO: 1603 - DNA, 16 bp, synthetic construct
  misc_feature 1..16: note = Description of Artificial Sequence: Syntheticoligonucleotide
  source 1..16: mol_type = other DNA
tcgcaggtgctgacat

SEQ ID NO: 1604 - DNA, 16 bp, synthetic construct
  misc_feature 1..16: note = Description of Artificial Sequence: Syntheticoligonucleotide
  source 1..16: mol_type = other DNA
acctatggaggctgtg

SEQ ID NO: 1605 - DNA, 16 bp, synthetic construct
  misc_feature 1..16: note = Description of Artificial Sequence: Syntheticoligonucleotide
  source 1..16: mol_type = other DNA
aggtcgagagaagcta

SEQ ID NO: 1606 - DNA, 16 bp, synthetic construct
  misc_feature 1..16: note = Description of Artificial Sequence: Syntheticoligonucleotide
  source 1..16: mol_type = other DNA
ttgggaacagtggaat

SEQ ID NO: 1607 - DNA, 16 bp, synthetic construct
  misc_feature 1..16: note = Description of Artificial Sequence: Syntheticoligonucleotide
  source 1..16: mol_type = other DNA
ctgcatgtcaggcctg

SEQ ID NO: 1608 - DNA, 16 bp, synthetic construct
  misc_feature 1..16: note = Description of Artificial Sequence: Syntheticoligonucleotide
  source 1..16: mol_type = other DNA
ttgcgcactatcccta

SEQ ID NO: 1609 - DNA, 16 bp, synthetic construct
  misc_feature 1..16: note = Description of Artificial Sequence: Syntheticoligonucleotide
  source 1..16: mol_type = other DNA
ggtcgctcaccacaga

SEQ ID NO: 1610 - DNA, 16 bp, synthetic construct
  misc_feature 1..16: note = Description of Artificial Sequence: Syntheticoligonucleotide
  source 1..16: mol_type = other DNA
catagctggtcctgct

SEQ ID NO: 1611 - DNA, 16 bp, synthetic construct
  misc_feature 1..16: note = Description of Artificial Sequence: Syntheticoligonucleotide
  source 1..16: mol_type = other DNA
atagggctctttacca

SEQ ID NO: 1612 - DNA, 16 bp, synthetic construct
  misc_feature 1..16: note = Description of Artificial Sequence: Syntheticoligonucleotide
  source 1..16: mol_type = other DNA
ccattcttacctggga

SEQ ID NO: 1613 - DNA, 16 bp, synthetic construct
  misc_feature 1..16: note = Description of Artificial Sequence: Syntheticoligonucleotide
  source 1..16: mol_type = other DNA
cgaaaggaagcttttg

SEQ ID NO: 1614 - DNA, 16 bp, synthetic construct
  misc_feature 1..16: note = Description of Artificial Sequence: Syntheticoligonucleotide
  source 1..16: mol_type = other DNA
tggccgaatatagtag

SEQ ID NO: 1615 - DNA, 16 bp, synthetic construct
  misc_feature 1..16: note = Description of Artificial Sequence: Syntheticoligonucleotide
  source 1..16: mol_type = other DNA
ggcgaatccaccccga

SEQ ID NO: 1616 - DNA, 16 bp, synthetic construct
  misc_feature 1..16: note = Description of Artificial Sequence: Syntheticoligonucleotide
  source 1..16: mol_type = other DNA
ccaaaggatgcaagag

SEQ ID NO: 1617 - DNA, 16 bp, synthetic construct
  misc_feature 1..16: note = Description of Artificial Sequence: Syntheticoligonucleotide
  source 1..16: mol_type = other DNA
acctgacataagttgt

SEQ ID NO: 1618 - DNA, 16 bp, synthetic construct
  misc_feature 1..16: note = Description of Artificial Sequence: Syntheticoligonucleotide
  source 1..16: mol_type = other DNA
tacaaggtgagtctac

SEQ ID NO: 1619 - DNA, 16 bp, synthetic construct
  misc_feature 1..16: note = Description of Artificial Sequence: Syntheticoligonucleotide
  source 1..16: mol_type = other DNA
cttacccagcggatga

SEQ ID NO: 1620 - DNA, 16 bp, synthetic construct
  misc_feature 1..16: note = Description of Artificial Sequence: Syntheticoligonucleotide
  source 1..16: mol_type = other DNA
tagggtcagaatttgg

SEQ ID NO: 1621 - DNA, 16 bp, synthetic construct
  misc_feature 1..16: note = Description of Artificial Sequence: Syntheticoligonucleotide
  source 1..16: mol_type = other DNA
gaaggagttagagtaa

SEQ ID NO: 1622 - DNA, 16 bp, synthetic construct
  misc_feature 1..16: note = Description of Artificial Sequence: Syntheticoligonucleotide
  source 1..16: mol_type = other DNA
gctaggatgaaggttc

SEQ ID NO: 1623 - DNA, 16 bp, synthetic construct
  misc_feature 1..16: note = Description of Artificial Sequence: Syntheticoligonucleotide
  source 1..16: mol_type = other DNA
gggttcggtgtggagt

SEQ ID NO: 1624 - DNA, 16 bp, synthetic construct
  misc_feature 1..16: note = Description of Artificial Sequence: Syntheticoligonucleotide
  source 1..16: mol_type = other DNA
gtgggttaagagtcag

SEQ ID NO: 1625 - DNA, 16 bp, synthetic construct
  misc_feature 1..16: note = Description of Artificial Sequence: Syntheticoligonucleotide
  source 1..16: mol_type = other DNA
caggactagatgtggg

SEQ ID NO: 1626 - DNA, 16 bp, synthetic construct
  misc_feature 1..16: note = Description of Artificial Sequence: Syntheticoligonucleotide
  source 1..16: mol_type = other DNA
gctgtacggtgtggaa

SEQ ID NO: 1627 - DNA, 16 bp, synthetic construct
  misc_feature 1..16: note = Description of Artificial Sequence: Syntheticoligonucleotide
  source 1..16: mol_type = other DNA
gcatcgggtccttgtc

SEQ ID NO: 1628 - DNA, 16 bp, synthetic construct
  misc_feature 1..16: note = Description of Artificial Sequence: Syntheticoligonucleotide
  source 1..16: mol_type = other DNA
cccgcctcgaagatct

SEQ ID NO: 1629 - DNA, 16 bp, synthetic construct
  misc_feature 1..16: note = Description of Artificial Sequence: Syntheticoligonucleotide
  source 1..16: mol_type = other DNA
ttgagagctggtgcat

SEQ ID NO: 1630 - DNA, 16 bp, synthetic construct
  misc_feature 1..16: note = Description of Artificial Sequence: Syntheticoligonucleotide
  source 1..16: mol_type = other DNA
gcagtgccggctccct

SEQ ID NO: 1631 - DNA, 16 bp, synthetic construct
  misc_feature 1..16: note = Description of Artificial Sequence: Syntheticoligonucleotide
  source 1..16: mol_type = other DNA
tgaggaagtcctctgg

SEQ ID NO: 1632 - DNA, 16 bp, synthetic construct
  misc_feature 1..16: note = Description of Artificial Sequence: Syntheticoligonucleotide
  source 1..16: mol_type = other DNA
tgtcggatgatgccac

SEQ ID NO: 1633 - DNA, 16 bp, synthetic construct
  misc_feature 1..16: note = Description of Artificial Sequence: Syntheticoligonucleotide
  source 1..16: mol_type = other DNA
tctgggaatgtgctgt

SEQ ID NO: 1634 - DNA, 16 bp, synthetic construct
  misc_feature 1..16: note = Description of Artificial Sequence: Syntheticoligonucleotide
  source 1..16: mol_type = other DNA
tccacccgcacaaagc

SEQ ID NO: 1635 - DNA, 16 bp, synthetic construct
  misc_feature 1..16: note = Description of Artificial Sequence: Syntheticoligonucleotide
  source 1..16: mol_type = other DNA
agtttggcccctgttc

SEQ ID NO: 1636 - DNA, 16 bp, synthetic construct
  misc_feature 1..16: note = Description of Artificial Sequence: Syntheticoligonucleotide
  source 1..16: mol_type = other DNA
tgtgcgagcagctgag

SEQ ID NO: 1637 - DNA, 16 bp, synthetic construct
  misc_feature 1..16: note = Description of Artificial Sequence: Syntheticoligonucleotide
  source 1..16: mol_type = other DNA
ttgaggttgtttgagt

SEQ ID NO: 1638 - DNA, 16 bp, synthetic construct
  misc_feature 1..16: note = Description of Artificial Sequence: Syntheticoligonucleotide
  source 1..16: mol_type = other DNA
gtgttgggacctcaga

SEQ ID NO: 1639 - DNA, 16 bp, synthetic construct
  misc_feature 1..16: note = Description of Artificial Sequence: Syntheticoligonucleotide
  source 1..16: mol_type = other DNA
gtagttcctctgcagt

SEQ ID NO: 1640 - DNA, 16 bp, synthetic construct
  misc_feature 1..16: note = Description of Artificial Sequence: Syntheticoligonucleotide
  source 1..16: mol_type = other DNA
ggataggagggcgagg

SEQ ID NO: 1641 - DNA, 16 bp, synthetic construct
  misc_feature 1..16: note = Description of Artificial Sequence: Syntheticoligonucleotide
  source 1..16: mol_type = other DNA
cctccccaatgtgcct

SEQ ID NO: 1642 - DNA, 16 bp, synthetic construct
  misc_feature 1..16: note = Description of Artificial Sequence: Syntheticoligonucleotide
  source 1..16: mol_type = other DNA
agctgggtacatccca

SEQ ID NO: 1643 - DNA, 16 bp, synthetic construct
  misc_feature 1..16: note = Description of Artificial Sequence: Syntheticoligonucleotide
  source 1..16: mol_type = other DNA
gcattaagtacttcac

SEQ ID NO: 1644 - DNA, 16 bp, synthetic construct
  misc_feature 1..16: note = Description of Artificial Sequence: Syntheticoligonucleotide
  source 1..16: mol_type = other DNA
cagatggcgggagaaa

SEQ ID NO: 1645 - DNA, 16 bp, synthetic construct
  misc_feature 1..16: note = Description of Artificial Sequence: Syntheticoligonucleotide
  source 1..16: mol_type = other DNA
caaagctctaggctgg

SEQ ID NO: 1646 - DNA, 16 bp, synthetic construct
  misc_feature 1..16: note = Description of Artificial Sequence: Syntheticoligonucleotide
  source 1..16: mol_type = other DNA
gccccggcaccttgca

SEQ ID NO: 1647 - DNA, 16 bp, synthetic construct
  misc_feature 1..16: note = Description of Artificial Sequence: Syntheticoligonucleotide
  source 1..16: mol_type = other DNA
gctaaactacggttga

SEQ ID NO: 1648 - DNA, 16 bp, synthetic construct
  misc_feature 1..16: note = Description of Artificial Sequence: Syntheticoligonucleotide
  source 1..16: mol_type = other DNA
gcttcaaaaacactac

SEQ ID NO: 1649 - DNA, 16 bp, synthetic construct
  misc_feature 1..16: note = Description of Artificial Sequence: Syntheticoligonucleotide
  source 1..16: mol_type = other DNA
gcaactcccttttcag

SEQ ID NO: 1650 - DNA, 16 bp, synthetic construct
  misc_feature 1..16: note = Description of Artificial Sequence: Syntheticoligonucleotide
  source 1..16: mol_type = other DNA
ataatactcacctagg

SEQ ID NO: 1651 - DNA, 16 bp, synthetic construct
  misc_feature 1..16: note = Description of Artificial Sequence: Syntheticoligonucleotide
  source 1..16: mol_type = other DNA
gtggcaaatcaataag

SEQ ID NO: 1652 - DNA, 16 bp, synthetic construct
  misc_feature 1..16: note = Description of Artificial Sequence: Syntheticoligonucleotide
  source 1..16: mol_type = other DNA
ggtgaacatttatctc

SEQ ID NO: 1653 - DNA, 16 bp, synthetic construct
  misc_feature 1..16: note = Description of Artificial Sequence: Syntheticoligonucleotide
  source 1..16: mol_type = other DNA
aatcacacatagggct

SEQ ID NO: 1654 - DNA, 16 bp, synthetic construct
  misc_feature 1..16: note = Description of Artificial Sequence: Syntheticoligonucleotide
  source 1..16: mol_type = other DNA
ccagatccattcaaga

SEQ ID NO: 1655 - DNA, 16 bp, synthetic construct
  misc_feature 1..16: note = Description of Artificial Sequence: Syntheticoligonucleotide
  source 1..16: mol_type = other DNA
aaactggaggaccatg

SEQ ID NO: 1656 - DNA, 16 bp, synthetic construct
  misc_feature 1..16: note = Description of Artificial Sequence: Syntheticoligonucleotide
  source 1..16: mol_type = other DNA
ttcaactgatgctgcc

SEQ ID NO: 1657 - DNA, 16 bp, synthetic construct
  misc_feature 1..16: note = Description of Artificial Sequence: Syntheticoligonucleotide
  source 1..16: mol_type = other DNA
atagggatacatagag

SEQ ID NO: 1658 - DNA, 16 bp, synthetic construct
  misc_feature 1..16: note = Description of Artificial Sequence: Syntheticoligonucleotide
  source 1..16: mol_type = other DNA
ccttctacactgagca

SEQ ID NO: 1659 - DNA, 16 bp, synthetic construct
  misc_feature 1..16: note = Description of Artificial Sequence: Syntheticoligonucleotide
  source 1..16: mol_type = other DNA
gcccagctcttgtgag

SEQ ID NO: 1660 - DNA, 16 bp, synthetic construct
  misc_feature 1..16: note = Description of Artificial Sequence: Syntheticoligonucleotide
  source 1..16: mol_type = other DNA
tcgccaatacagagcc

SEQ ID NO: 1661 - DNA, 16 bp, synthetic construct
  misc_feature 1..16: note = Description of Artificial Sequence: Syntheticoligonucleotide
  source 1..16: mol_type = other DNA
caaactccttggaacc

SEQ ID NO: 1662 - DNA, 16 bp, synthetic construct
  misc_feature 1..16: note = Description of Artificial Sequence: Syntheticoligonucleotide
  source 1..16: mol_type = other DNA
agctctgagagtgcca

SEQ ID NO: 1663 - DNA, 16 bp, synthetic construct
  misc_feature 1..16: note = Description of Artificial Sequence: Syntheticoligonucleotide
  source 1..16: mol_type = other DNA
gagggcagatacccca

SEQ ID NO: 1664 - DNA, 16 bp, synthetic construct
  misc_feature 1..16: note = Description of Artificial Sequence: Syntheticoligonucleotide
  source 1..16: mol_type = other DNA
gcccccgacttgccca

SEQ ID NO: 1665 - DNA, 16 bp, synthetic construct
  misc_feature 1..16: note = Description of Artificial Sequence: Syntheticoligonucleotide
  source 1..16: mol_type = other DNA
gcaaagcatagataca

SEQ ID NO: 1666 - DNA, 16 bp, synthetic construct
  misc_feature 1..16: note = Description of Artificial Sequence: Syntheticoligonucleotide
  source 1..16: mol_type = other DNA
aataccgatttcggtg

SEQ ID NO: 1667 - DNA, 16 bp, synthetic construct
  misc_feature 1..16: note = Description of Artificial Sequence: Syntheticoligonucleotide
  source 1..16: mol_type = other DNA
attaagttcttagtct

SEQ ID NO: 1668 - DNA, 16 bp, synthetic construct
  misc_feature 1..16: note = Description of Artificial Sequence: Syntheticoligonucleotide
  source 1..16: mol_type = other DNA
tgacttgagaactcca

SEQ ID NO: 1669 - DNA, 16 bp, synthetic construct
  misc_feature 1..16: note = Description of Artificial Sequence: Syntheticoligonucleotide
  source 1..16: mol_type = other DNA
cttgaaagccctccac

SEQ ID NO: 1670 - DNA, 16 bp, synthetic construct
  misc_feature 1..16: note = Description of Artificial Sequence: Syntheticoligonucleotide
  source 1..16: mol_type = other DNA
cacggatccagcatgg

SEQ ID NO: 1671 - DNA, 16 bp, synthetic construct
  misc_feature 1..16: note = Description of Artificial Sequence: Syntheticoligonucleotide
  source 1..16: mol_type = other DNA
gatagacatgaagagt

SEQ ID NO: 1672 - DNA, 16 bp, synthetic construct
  misc_feature 1..16: note = Description of Artificial Sequence: Syntheticoligonucleotide
  source 1..16: mol_type = other DNA
agcttggatgtagtgg

SEQ ID NO: 1673 - DNA, 16 bp, synthetic construct
  misc_feature 1..16: note = Description of Artificial Sequence: Syntheticoligonucleotide
  source 1..16: mol_type = other DNA
gaggaggctattgtaa

SEQ ID NO: 1674 - DNA, 16 bp, synthetic construct
  misc_feature 1..16: note = Description of Artificial Sequence: Syntheticoligonucleotide
  source 1..16: mol_type = other DNA
atgagggcaatggttg

SEQ ID NO: 1675 - DNA, 16 bp, synthetic construct
  misc_feature 1..16: note = Description of Artificial Sequence: Syntheticoligonucleotide
  source 1..16: mol_type = other DNA
tactcgaccacctgag

SEQ ID NO: 1676 - DNA, 16 bp, synthetic construct
  misc_feature 1..16: note = Description of Artificial Sequence: Syntheticoligonucleotide
  source 1..16: mol_type = other DNA
agacttgcctgggacc

SEQ ID NO: 1677 - DNA, 16 bp, synthetic construct
  misc_feature 1..16: note = Description of Artificial Sequence: Syntheticoligonucleotide
  source 1..16: mol_type = other DNA
atggagatcgagtaac

SEQ ID NO: 1678 - DNA, 16 bp, synthetic construct
  misc_feature 1..16: note = Description of Artificial Sequence: Syntheticoligonucleotide
  source 1..16: mol_type = other DNA
tccatacctggtgcat

SEQ ID NO: 1679 - DNA, 16 bp, synthetic construct
  misc_feature 1..16: note = Description of Artificial Sequence: Syntheticoligonucleotide
  source 1..16: mol_type = other DNA
cctgacacctttgacc

SEQ ID NO: 1680 - DNA, 16 bp, synthetic construct
  misc_feature 1..16: note = Description of Artificial Sequence: Syntheticoligonucleotide
  source 1..16: mol_type = other DNA
ttcgcaggtgctgaca

SEQ ID NO: 1681 - DNA, 16 bp, synthetic construct
  misc_feature 1..16: note = Description of Artificial Sequence: Syntheticoligonucleotide
  source 1..16: mol_type = other DNA
gttgatccctgtgggt

SEQ ID NO: 1682 - DNA, 16 bp, synthetic construct
  misc_feature 1..16: note = Description of Artificial Sequence: Syntheticoligonucleotide
  source 1..16: mol_type = other DNA
atacatacgagaaaac

SEQ ID NO: 1683 - DNA, 16 bp, synthetic construct
  misc_feature 1..16: note = Description of Artificial Sequence: Syntheticoligonucleotide
  source 1..16: mol_type = other DNA
aactttgggaacagtg

SEQ ID NO: 1684 - DNA, 16 bp, synthetic construct
  misc_feature 1..16: note = Description of Artificial Sequence: Syntheticoligonucleotide
  source 1..16: mol_type = other DNA
taacacatgcccctca

SEQ ID NO: 1685 - DNA, 16 bp, synthetic construct
  misc_feature 1..16: note = Description of Artificial Sequence: Syntheticoligonucleotide
  source 1..16: mol_type = other DNA
ttttgcgcactatccc

SEQ ID NO: 1686 - DNA, 16 bp, synthetic construct
  misc_feature 1..16: note = Description of Artificial Sequence: Syntheticoligonucleotide
  source 1..16: mol_type = other DNA
tctgagtctgccacca

SEQ ID NO: 1687 - DNA, 16 bp, synthetic construct
  misc_feature 1..16: note = Description of Artificial Sequence: Syntheticoligonucleotide
  source 1..16: mol_type = other DNA
acatagctggtcctgc

SEQ ID NO: 1688 - DNA, 16 bp, synthetic construct
  misc_feature 1..16: note = Description of Artificial Sequence: Syntheticoligonucleotide
  source 1..16: mol_type = other DNA
aatagggctctttacc

SEQ ID NO: 1689 - DNA, 16 bp, synthetic construct
  misc_feature 1..16: note = Description of Artificial Sequence: Syntheticoligonucleotide
  source 1..16: mol_type = other DNA
gaccattcttacctgg

SEQ ID NO: 1690 - DNA, 16 bp, synthetic construct
  misc_feature 1..16: note = Description of Artificial Sequence: Syntheticoligonucleotide
  source 1..16: mol_type = other DNA
ccgaaaggaagctttt

SEQ ID NO: 1691 - DNA, 16 bp, synthetic construct
  misc_feature 1..16: note = Description of Artificial Sequence: Syntheticoligonucleotide
  source 1..16: mol_type = other DNA
cttctgatggccgaat

SEQ ID NO: 1692 - DNA, 16 bp, synthetic construct
  misc_feature 1..16: note = Description of Artificial Sequence: Syntheticoligonucleotide
  source 1..16: mol_type = other DNA
gggcgaatccaccccg

SEQ ID NO: 1693 - DNA, 16 bp, synthetic construct
  misc_feature 1..16: note = Description of Artificial Sequence: Syntheticoligonucleotide
  source 1..16: mol_type = other DNA
accaaaggatgcaaga

SEQ ID NO: 1694 - DNA, 16 bp, synthetic construct
  misc_feature 1..16: note = Description of Artificial Sequence: Syntheticoligonucleotide
  source 1..16: mol_type = other DNA
cacctgacataagttg

SEQ ID NO: 1695 - DNA, 16 bp, synthetic construct
  misc_feature 1..16: note = Description of Artificial Sequence: Syntheticoligonucleotide
  source 1..16: mol_type = other DNA
ctacaaggtgagtcta

SEQ ID NO: 1696 - DNA, 16 bp, synthetic construct
  misc_feature 1..16: note = Description of Artificial Sequence: Syntheticoligonucleotide
  source 1..16: mol_type = other DNA
gcttacccagcggatg

SEQ ID NO: 1697 - DNA, 16 bp, synthetic construct
  misc_feature 1..16: note = Description of Artificial Sequence: Syntheticoligonucleotide
  source 1..16: mol_type = other DNA
ttagggtcagaatttg

SEQ ID NO: 1698 - DNA, 16 bp, synthetic construct
  misc_feature 1..16: note = Description of Artificial Sequence: Syntheticoligonucleotide
  source 1..16: mol_type = other DNA
ggaaggagttagagta

SEQ ID NO: 1699 - DNA, 16 bp, synthetic construct
  misc_feature 1..16: note = Description of Artificial Sequence: Syntheticoligonucleotide
  source 1..16: mol_type = other DNA
cgctaggatgaaggtt

SEQ ID NO: 1700 - DNA, 16 bp, synthetic construct
  misc_feature 1..16: note = Description of Artificial Sequence: Syntheticoligonucleotide
  source 1..16: mol_type = other DNA
tgaggttagttgtggg

SEQ ID NO: 1701 - DNA, 16 bp, synthetic construct
  misc_feature 1..16: note = Description of Artificial Sequence: Syntheticoligonucleotide
  source 1..16: mol_type = other DNA
ggtgggttaagagtca

SEQ ID NO: 1702 - DNA, 16 bp, synthetic construct
  misc_feature 1..16: note = Description of Artificial Sequence: Syntheticoligonucleotide
  source 1..16: mol_type = other DNA
acaggactagatgtgg

SEQ ID NO: 1703 - DNA, 16 bp, synthetic construct
  misc_feature 1..16: note = Description of Artificial Sequence: Syntheticoligonucleotide
  source 1..16: mol_type = other DNA
acttgaggaagtcctc

SEQ ID NO: 1704 - DNA, 16 bp, synthetic construct
  misc_feature 1..16: note = Description of Artificial Sequence: Syntheticoligonucleotide
  source 1..16: mol_type = other DNA
cacgctgtacggtgtg

SEQ ID NO: 1705 - DNA, 16 bp, synthetic construct
  misc_feature 1..16: note = Description of Artificial Sequence: Syntheticoligonucleotide
  source 1..16: mol_type = other DNA
ccgagggcttgccagg

SEQ ID NO: 1706 - DNA, 16 bp, synthetic construct
  misc_feature 1..16: note = Description of Artificial Sequence: Syntheticoligonucleotide
  source 1..16: mol_type = other DNA
ccccgcctcgaagatc

SEQ ID NO: 1707 - DNA, 16 bp, synthetic construct
  misc_feature 1..16: note = Description of Artificial Sequence: Syntheticoligonucleotide
  source 1..16: mol_type = other DNA
gttgagagctggtgca

SEQ ID NO: 1708 - DNA, 16 bp, synthetic construct
  misc_feature 1..16: note = Description of Artificial Sequence: Syntheticoligonucleotide
  source 1..16: mol_type = other DNA
gcagagcagtgccggc

SEQ ID NO: 1709 - DNA, 16 bp, synthetic construct
  misc_feature 1..16: note = Description of Artificial Sequence: Syntheticoligonucleotide
  source 1..16: mol_type = other DNA
ttgaggaagtcctctg

SEQ ID NO: 1710 - DNA, 16 bp, synthetic construct
  misc_feature 1..16: note = Description of Artificial Sequence: Syntheticoligonucleotide
  source 1..16: mol_type = other DNA
ttgtcggatgatgcca

SEQ ID NO: 1711 - DNA, 16 bp, synthetic construct
  misc_feature 1..16: note = Description of Artificial Sequence: Syntheticoligonucleotide
  source 1..16: mol_type = other DNA
gtggaggaactctggg

SEQ ID NO: 1712 - DNA, 16 bp, synthetic construct
  misc_feature 1..16: note = Description of Artificial Sequence: Syntheticoligonucleotide
  source 1..16: mol_type = other DNA
ctccacccgcacaaag

SEQ ID NO: 1713 - DNA, 16 bp, synthetic construct
  misc_feature 1..16: note = Description of Artificial Sequence: Syntheticoligonucleotide
  source 1..16: mol_type = other DNA
cagtttggcccctgtt

SEQ ID NO: 1714 - DNA, 16 bp, synthetic construct
  misc_feature 1..16: note = Description of Artificial Sequence: Syntheticoligonucleotide
  source 1..16: mol_type = other DNA
ctgtgcgagcagctga

SEQ ID NO: 1715 - DNA, 16 bp, synthetic construct
  misc_feature 1..16: note = Description of Artificial Sequence: Syntheticoligonucleotide
  source 1..16: mol_type = other DNA
gctttgaggttgtttg

SEQ ID NO: 1716 - DNA, 16 bp, synthetic construct
  misc_feature 1..16: note = Description of Artificial Sequence: Syntheticoligonucleotide
  source 1..16: mol_type = other DNA
cgtgttgggacctcag

SEQ ID NO: 1717 - DNA, 16 bp, synthetic construct
  misc_feature 1..16: note = Description of Artificial Sequence: Syntheticoligonucleotide
  source 1..16: mol_type = other DNA
gagtagttcctctgca

SEQ ID NO: 1718 - DNA, 16 bp, synthetic construct
  misc_feature 1..16: note = Description of Artificial Sequence: Syntheticoligonucleotide
  source 1..16: mol_type = other DNA
gacagagggtgtcagg

SEQ ID NO: 1719 - DNA, 16 bp, synthetic construct
  misc_feature 1..16: note = Description of Artificial Sequence: Syntheticoligonucleotide
  source 1..16: mol_type = other DNA
tcctccccaatgtgcc

SEQ ID NO: 1720 - DNA, 16 bp, synthetic construct
  misc_feature 1..16: note = Description of Artificial Sequence: Syntheticoligonucleotide
  source 1..16: mol_type = other DNA
gtagctgggtacatcc

SEQ ID NO: 1721 - DNA, 16 bp, synthetic construct
  misc_feature 1..16: note = Description of Artificial Sequence: Syntheticoligonucleotide
  source 1..16: mol_type = other DNA
gcccatgcattaagta

SEQ ID NO: 1722 - DNA, 16 bp, synthetic construct
  misc_feature 1..16: note = Description of Artificial Sequence: Syntheticoligonucleotide
  source 1..16: mol_type = other DNA
acagatggcgggagaa

SEQ ID NO: 1723 - DNA, 16 bp, synthetic construct
  misc_feature 1..16: note = Description of Artificial Sequence: Syntheticoligonucleotide
  source 1..16: mol_type = other DNA
acaaagctctaggctg

SEQ ID NO: 1724 - DNA, 16 bp, synthetic construct
  misc_feature 1..16: note = Description of Artificial Sequence: Syntheticoligonucleotide
  source 1..16: mol_type = other DNA
aagtgctcagcttgcc

SEQ ID NO: 1725 - DNA, 16 bp, synthetic construct
  misc_feature 1..16: note = Description of Artificial Sequence: Syntheticoligonucleotide
  source 1..16: mol_type = other DNA
agctaaactacggttg

SEQ ID NO: 1726 - DNA, 16 bp, synthetic construct
  misc_feature 1..16: note = Description of Artificial Sequence: Syntheticoligonucleotide
  source 1..16: mol_type = other DNA
gaggacagtcttgtcc

SEQ ID NO: 1727 - DNA, 16 bp, synthetic construct
  misc_feature 1..16: note = Description of Artificial Sequence: Syntheticoligonucleotide
  source 1..16: mol_type = other DNA
cacgccccctttgccc

SEQ ID NO: 1728 - DNA, 16 bp, synthetic construct
  misc_feature 1..16: note = Description of Artificial Sequence: Syntheticoligonucleotide
  source 1..16: mol_type = other DNA
aataatactcacctag

SEQ ID NO: 1729 - DNA, 16 bp, synthetic construct
  misc_feature 1..16: note = Description of Artificial Sequence: Syntheticoligonucleotide
  source 1..16: mol_type = other DNA
gctgtggcaaatcaat

SEQ ID NO: 1730 - DNA, 16 bp, synthetic construct
  misc_feature 1..16: note = Description of Artificial Sequence: Syntheticoligonucleotide
  source 1..16: mol_type = other DNA
cataggtgaacattta

SEQ ID NO: 1731 - DNA, 16 bp, synthetic construct
  misc_feature 1..16: note = Description of Artificial Sequence: Syntheticoligonucleotide
  source 1..16: mol_type = other DNA
taagtgcctggctaaa

SEQ ID NO: 1732 - DNA, 16 bp, synthetic construct
  misc_feature 1..16: note = Description of Artificial Sequence: Syntheticoligonucleotide
  source 1..16: mol_type = other DNA
cccagatccattcaag

SEQ ID NO: 1733 - DNA, 16 bp, synthetic construct
  misc_feature 1..16: note = Description of Artificial Sequence: Syntheticoligonucleotide
  source 1..16: mol_type = other DNA
caaactggaggaccat

SEQ ID NO: 1734 - DNA, 16 bp, synthetic construct
  misc_feature 1..16: note = Description of Artificial Sequence: Syntheticoligonucleotide
  source 1..16: mol_type = other DNA
gttcaactgatgctgc

SEQ ID NO: 1735 - DNA, 16 bp, synthetic construct
  misc_feature 1..16: note = Description of Artificial Sequence: Syntheticoligonucleotide
  source 1..16: mol_type = other DNA
gatagggatacataga

SEQ ID NO: 1736 - DNA, 16 bp, synthetic construct
  misc_feature 1..16: note = Description of Artificial Sequence: Syntheticoligonucleotide
  source 1..16: mol_type = other DNA
cccttctacactgagc

SEQ ID NO: 1737 - DNA, 16 bp, synthetic construct
  misc_feature 1..16: note = Description of Artificial Sequence: Syntheticoligonucleotide
  source 1..16: mol_type = other DNA
tcacctagcccagctc

SEQ ID NO: 1738 - DNA, 16 bp, synthetic construct
  misc_feature 1..16: note = Description of Artificial Sequence: Syntheticoligonucleotide
  source 1..16: mol_type = other DNA
ttcgccaatacagagc

SEQ ID NO: 1739 - DNA, 16 bp, synthetic construct
  misc_feature 1..16: note = Description of Artificial Sequence: Syntheticoligonucleotide
  source 1..16: mol_type = other DNA
gtccaaactccttgga

SEQ ID NO: 1740 - DNA, 16 bp, synthetic construct
  misc_feature 1..16: note = Description of Artificial Sequence: Syntheticoligonucleotide
  source 1..16: mol_type = other DNA
aggtttgaagctctga

SEQ ID NO: 1741 - DNA, 16 bp, synthetic construct
  misc_feature 1..16: note = Description of Artificial Sequence: Syntheticoligonucleotide
  source 1..16: mol_type = other DNA
agagggcagatacccc

SEQ ID NO: 1742 - DNA, 16 bp, synthetic construct
  misc_feature 1..16: note = Description of Artificial Sequence: Syntheticoligonucleotide
  source 1..16: mol_type = other DNA
agcccccgacttgccc

SEQ ID NO: 1743 - DNA, 16 bp, synthetic construct
  misc_feature 1..16: note = Description of Artificial Sequence: Syntheticoligonucleotide
  source 1..16: mol_type = other DNA
agcaaagcatagatac

SEQ ID NO: 1744 - DNA, 16 bp, synthetic construct
  misc_feature 1..16: note = Description of Artificial Sequence: Syntheticoligonucleotide
  source 1..16: mol_type = other DNA
taataccgatttcggt

SEQ ID NO: 1745 - DNA, 16 bp, synthetic construct
  misc_feature 1..16: note = Description of Artificial Sequence: Syntheticoligonucleotide
  source 1..16: mol_type = other DNA
tattaagttcttagtc

SEQ ID NO: 1746 - DNA, 16 bp, synthetic construct
  misc_feature 1..16: note = Description of Artificial Sequence: Syntheticoligonucleotide
  source 1..16: mol_type = other DNA
agtgacttgagaactc

SEQ ID NO: 1747 - DNA, 16 bp, synthetic construct
  misc_feature 1..16: note = Description of Artificial Sequence: Syntheticoligonucleotide
  source 1..16: mol_type = other DNA
accttgaaagccctcc

SEQ ID NO: 1748 - DNA, 16 bp, synthetic construct
  misc_feature 1..16: note = Description of Artificial Sequence: Syntheticoligonucleotide
  source 1..16: mol_type = other DNA
gcacggatccagcatg

SEQ ID NO: 1749 - DNA, 16 bp, synthetic construct
  misc_feature 1..16: note = Description of Artificial Sequence: Syntheticoligonucleotide
  source 1..16: mol_type = other DNA
gtagatagacatgaag

SEQ ID NO: 1750 - DNA, 16 bp, synthetic construct
  misc_feature 1..16: note = Description of Artificial Sequence: Syntheticoligonucleotide
  source 1..16: mol_type = other DNA
cagcttggatgtagtg

SEQ ID NO: 1751 - DNA, 16 bp, synthetic construct
  misc_feature 1..16: note = Description of Artificial Sequence: Syntheticoligonucleotide
  source 1..16: mol_type = other DNA
agattcatctggctgc

SEQ ID NO: 1752 - DNA, 16 bp, synthetic construct
  misc_feature 1..16: note = Description of Artificial Sequence: Syntheticoligonucleotide
  source 1..16: mol_type = other DNA
tatgagggcaatggtt

SEQ ID NO: 1753 - DNA, 16 bp, synthetic construct
  misc_feature 1..16: note = Description of Artificial Sequence: Syntheticoligonucleotide
  source 1..16: mol_type = other DNA
atactcgaccacctga

SEQ ID NO: 1754 - DNA, 16 bp, synthetic construct
  misc_feature 1..16: note = Description of Artificial Sequence: Syntheticoligonucleotide
  source 1..16: mol_type = other DNA
tcacagacttgcctgg

SEQ ID NO: 1755 - DNA, 16 bp, synthetic construct
  misc_feature 1..16: note = Description of Artificial Sequence: Syntheticoligonucleotide
  source 1..16: mol_type = other DNA
cgtatggaaactgagg

SEQ ID NO: 1756 - DNA, 16 bp, synthetic construct
  misc_feature 1..16: note = Description of Artificial Sequence: Syntheticoligonucleotide
  source 1..16: mol_type = other DNA
cgtccatacctggtgc

SEQ ID NO: 1757 - DNA, 16 bp, synthetic construct
  misc_feature 1..16: note = Description of Artificial Sequence: Syntheticoligonucleotide
  source 1..16: mol_type = other DNA
acctgacacctttgac

SEQ ID NO: 1758 - DNA, 16 bp, synthetic construct
  misc_feature 1..16: note = Description of Artificial Sequence: Syntheticoligonucleotide
  source 1..16: mol_type = other DNA
attcgcaggtgctgac

SEQ ID NO: 1759 - DNA, 16 bp, synthetic construct
  misc_feature 1..16: note = Description of Artificial Sequence: Syntheticoligonucleotide
  source 1..16: mol_type = other DNA
ttatacatacgagaaa

SEQ ID NO: 1760 - DNA, 16 bp, synthetic construct
  misc_feature 1..16: note = Description of Artificial Sequence: Syntheticoligonucleotide
  source 1..16: mol_type = other DNA
tagaactttgggaaca

SEQ ID NO: 1761 - DNA, 16 bp, synthetic construct
  misc_feature 1..16: note = Description of Artificial Sequence: Syntheticoligonucleotide
  source 1..16: mol_type = other DNA
cttaacacatgcccct

SEQ ID NO: 1762 - DNA, 16 bp, synthetic construct
  misc_feature 1..16: note = Description of Artificial Sequence: Syntheticoligonucleotide
  source 1..16: mol_type = other DNA
agaaggttttgcgcac

SEQ ID NO: 1763 - DNA, 16 bp, synthetic construct
  misc_feature 1..16: note = Description of Artificial Sequence: Syntheticoligonucleotide
  source 1..16: mol_type = other DNA
gttaggttccctgcac

SEQ ID NO: 1764 - DNA, 16 bp, synthetic construct
  misc_feature 1..16: note = Description of Artificial Sequence: Syntheticoligonucleotide
  source 1..16: mol_type = other DNA
tacatagctggtcctg

SEQ ID NO: 1765 - DNA, 16 bp, synthetic construct
  misc_feature 1..16: note = Description of Artificial Sequence: Syntheticoligonucleotide
  source 1..16: mol_type = other DNA
gaatagggctctttac

SEQ ID NO: 1766 - DNA, 16 bp, synthetic construct
  misc_feature 1..16: note = Description of Artificial Sequence: Syntheticoligonucleotide
  source 1..16: mol_type = other DNA
ggaccattcttacctg

SEQ ID NO: 1767 - DNA, 16 bp, synthetic construct
  misc_feature 1..16: note = Description of Artificial Sequence: Syntheticoligonucleotide
  source 1..16: mol_type = other DNA
cccgaaaggaagcttt

SEQ ID NO: 1768 - DNA, 16 bp, synthetic construct
  misc_feature 1..16: note = Description of Artificial Sequence: Syntheticoligonucleotide
  source 1..16: mol_type = other DNA
cccttctgatggccga

SEQ ID NO: 1769 - DNA, 16 bp, synthetic construct
  misc_feature 1..16: note = Description of Artificial Sequence: Syntheticoligonucleotide
  source 1..16: mol_type = other DNA
cgggcgaatccacccc

SEQ ID NO: 1770 - DNA, 16 bp, synthetic construct
  misc_feature 1..16: note = Description of Artificial Sequence: Syntheticoligonucleotide
  source 1..16: mol_type = other DNA
caccaaaggatgcaag

SEQ ID NO: 1771 - DNA, 16 bp, synthetic construct
  misc_feature 1..16: note = Description of Artificial Sequence: Syntheticoligonucleotide
  source 1..16: mol_type = other DNA
gcacctgacataagtt

SEQ ID NO: 1772 - DNA, 16 bp, synthetic construct
  misc_feature 1..16: note = Description of Artificial Sequence: Syntheticoligonucleotide
  source 1..16: mol_type = other DNA
cctacaaggtgagtct

SEQ ID NO: 1773 - DNA, 16 bp, synthetic construct
  misc_feature 1..16: note = Description of Artificial Sequence: Syntheticoligonucleotide
  source 1..16: mol_type = other DNA
tgcttacccagcggat

SEQ ID NO: 1774 - DNA, 16 bp, synthetic construct
  misc_feature 1..16: note = Description of Artificial Sequence: Syntheticoligonucleotide
  source 1..16: mol_type = other DNA
gtttagggtcagaatt

SEQ ID NO: 1775 - DNA, 16 bp, synthetic construct
  misc_feature 1..16: note = Description of Artificial Sequence: Syntheticoligonucleotide
  source 1..16: mol_type = other DNA
gggaaggagttagagt

SEQ ID NO: 1776 - DNA, 16 bp, synthetic construct
  misc_feature 1..16: note = Description of Artificial Sequence: Syntheticoligonucleotide
  source 1..16: mol_type = other DNA
gcgctaggatgaaggt

SEQ ID NO: 1777 - DNA, 16 bp, synthetic construct
  misc_feature 1..16: note = Description of Artificial Sequence: Syntheticoligonucleotide
  source 1..16: mol_type = other DNA
gatgaggttagttgtg

SEQ ID NO: 1778 - DNA, 16 bp, synthetic construct
  misc_feature 1..16: note = Description of Artificial Sequence: Syntheticoligonucleotide
  source 1..16: mol_type = other DNA
caacttaagggtcagg

SEQ ID NO: 1779 - DNA, 16 bp, synthetic construct
  misc_feature 1..16: note = Description of Artificial Sequence: Syntheticoligonucleotide
  source 1..16: mol_type = other DNA
gacaggactagatgtg

SEQ ID NO: 1780 - DNA, 16 bp, synthetic construct
  misc_feature 1..16: note = Description of Artificial Sequence: Syntheticoligonucleotide
  source 1..16: mol_type = other DNA
accacgctgtacggtg

SEQ ID NO: 1781 - DNA, 16 bp, synthetic construct
  misc_feature 1..16: note = Description of Artificial Sequence: Syntheticoligonucleotide
  source 1..16: mol_type = other DNA
gccgagggcttgccag

SEQ ID NO: 1782 - DNA, 16 bp, synthetic construct
  misc_feature 1..16: note = Description of Artificial Sequence: Syntheticoligonucleotide
  source 1..16: mol_type = other DNA
gccccgcctcgaagat

SEQ ID NO: 1783 - DNA, 16 bp, synthetic construct
  misc_feature 1..16: note = Description of Artificial Sequence: Syntheticoligonucleotide
  source 1..16: mol_type = other DNA
ccgttgagagctggtg

SEQ ID NO: 1784 - DNA, 16 bp, synthetic construct
  misc_feature 1..16: note = Description of Artificial Sequence: Syntheticoligonucleotide
  source 1..16: mol_type = other DNA
gtgcagagcagtgccg

SEQ ID NO: 1785 - DNA, 16 bp, synthetic construct
  misc_feature 1..16: note = Description of Artificial Sequence: Syntheticoligonucleotide
  source 1..16: mol_type = other DNA
gcttgaggaagtcctc

SEQ ID NO: 1786 - DNA, 16 bp, synthetic construct
  misc_feature 1..16: note = Description of Artificial Sequence: Syntheticoligonucleotide
  source 1..16: mol_type = other DNA
cttgtcggatgatgcc

SEQ ID NO: 1787 - DNA, 16 bp, synthetic construct
  misc_feature 1..16: note = Description of Artificial Sequence: Syntheticoligonucleotide
  source 1..16: mol_type = other DNA
catgttgtggaggaac

SEQ ID NO: 1788 - DNA, 16 bp, synthetic construct
  misc_feature 1..16: note = Description of Artificial Sequence: Syntheticoligonucleotide
  source 1..16: mol_type = other DNA
ctctccacccgcacaa

SEQ ID NO: 1789 - DNA, 16 bp, synthetic construct
  misc_feature 1..16: note = Description of Artificial Sequence: Syntheticoligonucleotide
  source 1..16: mol_type = other DNA
ccagtttggcccctgt

SEQ ID NO: 1790 - DNA, 16 bp, synthetic construct
  misc_feature 1..16: note = Description of Artificial Sequence: Syntheticoligonucleotide
  source 1..16: mol_type = other DNA
tctgtgcgagcagctg

SEQ ID NO: 1791 - DNA, 16 bp, synthetic construct
  misc_feature 1..16: note = Description of Artificial Sequence: Syntheticoligonucleotide
  source 1..16: mol_type = other DNA
cagctttgaggttgtt

SEQ ID NO: 1792 - DNA, 16 bp, synthetic construct
  misc_feature 1..16: note = Description of Artificial Sequence: Syntheticoligonucleotide
  source 1..16: mol_type = other DNA
caggccgtgtgtgtga

SEQ ID NO: 1793 - DNA, 16 bp, synthetic construct
  misc_feature 1..16: note = Description of Artificial Sequence: Syntheticoligonucleotide
  source 1..16: mol_type = other DNA
tgagtagttcctctgc

SEQ ID NO: 1794 - DNA, 16 bp, synthetic construct
  misc_feature 1..16: note = Description of Artificial Sequence: Syntheticoligonucleotide
  source 1..16: mol_type = other DNA
gaggagctcaccttcc

SEQ ID NO: 1795 - DNA, 16 bp, synthetic construct
  misc_feature 1..16: note = Description of Artificial Sequence: Syntheticoligonucleotide
  source 1..16: mol_type = other DNA
cccgttcctccccaat

SEQ ID NO: 1796 - DNA, 16 bp, synthetic construct
  misc_feature 1..16: note = Description of Artificial Sequence: Syntheticoligonucleotide
  source 1..16: mol_type = other DNA
cggtagctgggtacat

SEQ ID NO: 1797 - DNA, 16 bp, synthetic construct
  misc_feature 1..16: note = Description of Artificial Sequence: Syntheticoligonucleotide
  source 1..16: mol_type = other DNA
ctgcccatgcattaag

SEQ ID NO: 1798 - DNA, 16 bp, synthetic construct
  misc_feature 1..16: note = Description of Artificial Sequence: Syntheticoligonucleotide
  source 1..16: mol_type = other DNA
gacagatggcgggaga

SEQ ID NO: 1799 - DNA, 16 bp, synthetic construct
  misc_feature 1..16: note = Description of Artificial Sequence: Syntheticoligonucleotide
  source 1..16: mol_type = other DNA
tacaaagctctaggct

SEQ ID NO: 1800 - DNA, 16 bp, synthetic construct
  misc_feature 1..16: note = Description of Artificial Sequence: Syntheticoligonucleotide
  source 1..16: mol_type = other DNA
ttaagtgctcagcttg

SEQ ID NO: 1801 - DNA, 16 bp, synthetic construct
  misc_feature 1..16: note = Description of Artificial Sequence: Syntheticoligonucleotide
  source 1..16: mol_type = other DNA
cagctaaactacggtt

SEQ ID NO: 1802 - DNA, 16 bp, synthetic construct
  misc_feature 1..16: note = Description of Artificial Sequence: Syntheticoligonucleotide
  source 1..16: mol_type = other DNA
tgaggacagtcttgtc

SEQ ID NO: 1803 - DNA, 16 bp, synthetic construct
  misc_feature 1..16: note = Description of Artificial Sequence: Syntheticoligonucleotide
  source 1..16: mol_type = other DNA
aaaatgcacgccccct

SEQ ID NO: 1804 - DNA, 16 bp, synthetic construct
  misc_feature 1..16: note = Description of Artificial Sequence: Syntheticoligonucleotide
  source 1..16: mol_type = other DNA
gtaatcacaagatgca

SEQ ID NO: 1805 - DNA, 16 bp, synthetic construct
  misc_feature 1..16: note = Description of Artificial Sequence: Syntheticoligonucleotide
  source 1..16: mol_type = other DNA
ataaagagctgtggca

SEQ ID NO: 1806 - DNA, 16 bp, synthetic construct
  misc_feature 1..16: note = Description of Artificial Sequence: Syntheticoligonucleotide
  source 1..16: mol_type = other DNA
ccaacataggtgaaca

SEQ ID NO: 1807 - DNA, 16 bp, synthetic construct
  misc_feature 1..16: note = Description of Artificial Sequence: Syntheticoligonucleotide
  source 1..16: mol_type = other DNA
ttaagtgcctggctaa

SEQ ID NO: 1808 - DNA, 16 bp, synthetic construct
  misc_feature 1..16: note = Description of Artificial Sequence: Syntheticoligonucleotide
  source 1..16: mol_type = other DNA
taccctaaaatgccca

SEQ ID NO: 1809 - DNA, 16 bp, synthetic construct
  misc_feature 1..16: note = Description of Artificial Sequence: Syntheticoligonucleotide
  source 1..16: mol_type = other DNA
tcaaactggaggacca

SEQ ID NO: 1810 - DNA, 16 bp, synthetic construct
  misc_feature 1..16: note = Description of Artificial Sequence: Syntheticoligonucleotide
  source 1..16: mol_type = other DNA
ggctggttcaactgat

SEQ ID NO: 1811 - DNA, 16 bp, synthetic construct
  misc_feature 1..16: note = Description of Artificial Sequence: Syntheticoligonucleotide
  source 1..16: mol_type = other DNA
agatagggatacatag

SEQ ID NO: 1812 - DNA, 16 bp, synthetic construct
  misc_feature 1..16: note = Description of Artificial Sequence: Syntheticoligonucleotide
  source 1..16: mol_type = other DNA
gcccttctacactgag

SEQ ID NO: 1813 - DNA, 16 bp, synthetic construct
  misc_feature 1..16: note = Description of Artificial Sequence: Syntheticoligonucleotide
  source 1..16: mol_type = other DNA
ctcacctagcccagct

SEQ ID NO: 1814 - DNA, 16 bp, synthetic construct
  misc_feature 1..16: note = Description of Artificial Sequence: Syntheticoligonucleotide
  source 1..16: mol_type = other DNA
cttcgccaatacagag

SEQ ID NO: 1815 - DNA, 16 bp, synthetic construct
  misc_feature 1..16: note = Description of Artificial Sequence: Syntheticoligonucleotide
  source 1..16: mol_type = other DNA
ctcagtatgtgtaggc

SEQ ID NO: 1816 - DNA, 16 bp, synthetic construct
  misc_feature 1..16: note = Description of Artificial Sequence: Syntheticoligonucleotide
  source 1..16: mol_type = other DNA
caggtttgaagctctg

SEQ ID NO: 1817 - DNA, 16 bp, synthetic construct
  misc_feature 1..16: note = Description of Artificial Sequence: Syntheticoligonucleotide
  source 1..16: mol_type = other DNA
aagagggcagataccc

SEQ ID NO: 1818 - DNA, 16 bp, synthetic construct
  misc_feature 1..16: note = Description of Artificial Sequence: Syntheticoligonucleotide
  source 1..16: mol_type = other DNA
cagcccccgacttgcc

SEQ ID NO: 1819 - DNA, 16 bp, synthetic construct
  misc_feature 1..16: note = Description of Artificial Sequence: Syntheticoligonucleotide
  source 1..16: mol_type = other DNA
tcagcaaagcatagat

SEQ ID NO: 1820 - DNA, 16 bp, synthetic construct
  misc_feature 1..16: note = Description of Artificial Sequence: Syntheticoligonucleotide
  source 1..16: mol_type = other DNA
ctaataccgatttcgg

SEQ ID NO: 1821 - DNA, 16 bp, synthetic construct
  misc_feature 1..16: note = Description of Artificial Sequence: Syntheticoligonucleotide
  source 1..16: mol_type = other DNA
gtattaagttcttagt

SEQ ID NO: 1822 - DNA, 16 bp, synthetic construct
  misc_feature 1..16: note = Description of Artificial Sequence: Syntheticoligonucleotide
  source 1..16: mol_type = other DNA
atagtgacttgagaac

SEQ ID NO: 1823 - DNA, 16 bp, synthetic construct
  misc_feature 1..16: note = Description of Artificial Sequence: Syntheticoligonucleotide
  source 1..16: mol_type = other DNA
caccttgaaagccctc

SEQ ID NO: 1824 - DNA, 16 bp, synthetic construct
  misc_feature 1..16: note = Description of Artificial Sequence: Syntheticoligonucleotide
  source 1..16: mol_type = other DNA
tgcacggatccagcat

SEQ ID NO: 1825 - DNA, 16 bp, synthetic construct
  misc_feature 1..16: note = Description of Artificial Sequence: Syntheticoligonucleotide
  source 1..16: mol_type = other DNA
tgtagatagacatgaa

SEQ ID NO: 1826 - DNA, 16 bp, synthetic construct
  misc_feature 1..16: note = Description of Artificial Sequence: Syntheticoligonucleotide
  source 1..16: mol_type = other DNA
gatcaggagcagtgct

SEQ ID NO: 1827 - DNA, 16 bp, synthetic construct
  misc_feature 1..16: note = Description of Artificial Sequence: Syntheticoligonucleotide
  source 1..16: mol_type = other DNA
taggcatggactcaaa

SEQ ID NO: 1828 - DNA, 16 bp, synthetic construct
  misc_feature 1..16: note = Description of Artificial Sequence: Syntheticoligonucleotide
  source 1..16: mol_type = other DNA
ctatgagggcaatggt

SEQ ID NO: 1829 - DNA, 16 bp, synthetic construct
  misc_feature 1..16: note = Description of Artificial Sequence: Syntheticoligonucleotide
  source 1..16: mol_type = other DNA
gatactcgaccacctg

SEQ ID NO: 1830 - DNA, 16 bp, synthetic construct
  misc_feature 1..16: note = Description of Artificial Sequence: Syntheticoligonucleotide
  source 1..16: mol_type = other DNA
cataagtcacagactt

SEQ ID NO: 1831 - DNA, 16 bp, synthetic construct
  misc_feature 1..16: note = Description of Artificial Sequence: Syntheticoligonucleotide
  source 1..16: mol_type = other DNA
tatgatcatccccctt

SEQ ID NO: 1832 - DNA, 16 bp, synthetic construct
  misc_feature 1..16: note = Description of Artificial Sequence: Syntheticoligonucleotide
  source 1..16: mol_type = other DNA
ccgtccatacctggtg

SEQ ID NO: 1833 - DNA, 16 bp, synthetic construct
  misc_feature 1..16: note = Description of Artificial Sequence: Syntheticoligonucleotide
  source 1..16: mol_type = other DNA
gacctgacacctttga

SEQ ID NO: 1834 - DNA, 16 bp, synthetic construct
  misc_feature 1..16: note = Description of Artificial Sequence: Syntheticoligonucleotide
  source 1..16: mol_type = other DNA
cattcgcaggtgctga

SEQ ID NO: 1835 - DNA, 16 bp, synthetic construct
  misc_feature 1..16: note = Description of Artificial Sequence: Syntheticoligonucleotide
  source 1..16: mol_type = other DNA
cacttgaggaagtcct

SEQ ID NO: 1836 - DNA, 16 bp, synthetic construct
  misc_feature 1..16: note = Description of Artificial Sequence: Syntheticoligonucleotide
  source 1..16: mol_type = other DNA
attatacatacgagaa

SEQ ID NO: 1837 - DNA, 16 bp, synthetic construct
  misc_feature 1..16: note = Description of Artificial Sequence: Syntheticoligonucleotide
  source 1..16: mol_type = other DNA
gagctagaactttggg

SEQ ID NO: 1838 - DNA, 16 bp, synthetic construct
  misc_feature 1..16: note = Description of Artificial Sequence: Syntheticoligonucleotide
  source 1..16: mol_type = other DNA
ccttaacacatgcccc

SEQ ID NO: 1839 - DNA, 16 bp, synthetic construct
  misc_feature 1..16: note = Description of Artificial Sequence: Syntheticoligonucleotide
  source 1..16: mol_type = other DNA
acagaaggttttgcgc

SEQ ID NO: 1840 - DNA, 16 bp, synthetic construct
  misc_feature 1..16: note = Description of Artificial Sequence: Syntheticoligonucleotide
  source 1..16: mol_type = other DNA
ggttaggttccctgca

SEQ ID NO: 1841 - DNA, 16 bp, synthetic construct
  misc_feature 1..16: note = Description of Artificial Sequence: Syntheticoligonucleotide
  source 1..16: mol_type = other DNA
ttacatagctggtcct

SEQ ID NO: 1842 - DNA, 16 bp, synthetic construct
  misc_feature 1..16: note = Description of Artificial Sequence: Syntheticoligonucleotide
  source 1..16: mol_type = other DNA
tgaatagggctcttta

SEQ ID NO: 1843 - DNA, 16 bp, synthetic construct
  misc_feature 1..16: note = Description of Artificial Sequence: Syntheticoligonucleotide
  source 1..16: mol_type = other DNA
aaggaccattcttacc

SEQ ID NO: 1844 - DNA, 16 bp, synthetic construct
  misc_feature 1..16: note = Description of Artificial Sequence: Syntheticoligonucleotide
  source 1..16: mol_type = other DNA
tcccgaaaggaagctt

SEQ ID NO: 1845 - DNA, 16 bp, synthetic construct
  misc_feature 1..16: note = Description of Artificial Sequence: Syntheticoligonucleotide
  source 1..16: mol_type = other DNA
gggtccctcccttctg

SEQ ID NO: 1846 - DNA, 16 bp, synthetic construct
  misc_feature 1..16: note = Description of Artificial Sequence: Syntheticoligonucleotide
  source 1..16: mol_type = other DNA
tcgggcgaatccaccc

SEQ ID NO: 1847 - DNA, 16 bp, synthetic construct
  misc_feature 1..16: note = Description of Artificial Sequence: Syntheticoligonucleotide
  source 1..16: mol_type = other DNA
gcacaccaaaggatgc

SEQ ID NO: 1848 - DNA, 16 bp, synthetic construct
  misc_feature 1..16: note = Description of Artificial Sequence: Syntheticoligonucleotide
  source 1..16: mol_type = other DNA
agcacctgacataagt

SEQ ID NO: 1849 - DNA, 16 bp, synthetic construct
  misc_feature 1..16: note = Description of Artificial Sequence: Syntheticoligonucleotide
  source 1..16: mol_type = other DNA
ccctacaaggtgagtc

SEQ ID NO: 1850 - DNA, 16 bp, synthetic construct
  misc_feature 1..16: note = Description of Artificial Sequence: Syntheticoligonucleotide
  source 1..16: mol_type = other DNA
ctgcttacccagcgga

SEQ ID NO: 1851 - DNA, 16 bp, synthetic construct
  misc_feature 1..16: note = Description of Artificial Sequence: Syntheticoligonucleotide
  source 1..16: mol_type = other DNA
ggtttagggtcagaat

SEQ ID NO: 1852 - DNA, 16 bp, synthetic construct
  misc_feature 1..16: note = Description of Artificial Sequence: Syntheticoligonucleotide
  source 1..16: mol_type = other DNA
tggcataaaggctggg

SEQ ID NO: 1853 - DNA, 16 bp, synthetic construct
  misc_feature 1..16: note = Description of Artificial Sequence: Syntheticoligonucleotide
  source 1..16: mol_type = other DNA
gtgaggttcaggtttg

SEQ ID NO: 1854 - DNA, 16 bp, synthetic construct
  misc_feature 1..16: note = Description of Artificial Sequence: Syntheticoligonucleotide
  source 1..16: mol_type = other DNA
ggatgaggttagttgt

SEQ ID NO: 1855 - DNA, 16 bp, synthetic construct
  misc_feature 1..16: note = Description of Artificial Sequence: Syntheticoligonucleotide
  source 1..16: mol_type = other DNA
gccaacttaagggtca

SEQ ID NO: 1856 - DNA, 16 bp, synthetic construct
  misc_feature 1..16: note = Description of Artificial Sequence: Syntheticoligonucleotide
  source 1..16: mol_type = other DNA
ggacaggactagatgt

SEQ ID NO: 1857 - DNA, 16 bp, synthetic construct
  misc_feature 1..16: note = Description of Artificial Sequence: Syntheticoligonucleotide
  source 1..16: mol_type = other DNA
aaaccacgctgtacgg

SEQ ID NO: 1858 - DNA, 16 bp, synthetic construct
  misc_feature 1..16: note = Description of Artificial Sequence: Syntheticoligonucleotide
  source 1..16: mol_type = other DNA
ggccgagggcttgcca

SEQ ID NO: 1859 - DNA, 16 bp, synthetic construct
  misc_feature 1..16: note = Description of Artificial Sequence: Syntheticoligonucleotide
  source 1..16: mol_type = other DNA
tgggccccgcctcgaa

SEQ ID NO: 1860 - DNA, 16 bp, synthetic construct
  misc_feature 1..16: note = Description of Artificial Sequence: Syntheticoligonucleotide
  source 1..16: mol_type = other DNA
accgttgagagctggt

SEQ ID NO: 1861 - DNA, 16 bp, synthetic construct
  misc_feature 1..16: note = Description of Artificial Sequence: Syntheticoligonucleotide
  source 1..16: mol_type = other DNA
gatttgggaaggtgca

SEQ ID NO: 1862 - DNA, 16 bp, synthetic construct
  misc_feature 1..16: note = Description of Artificial Sequence: Syntheticoligonucleotide
  source 1..16: mol_type = other DNA
gtgcttgaggaagtcc

SEQ ID NO: 1863 - DNA, 16 bp, synthetic construct
  misc_feature 1..16: note = Description of Artificial Sequence: Syntheticoligonucleotide
  source 1..16: mol_type = other DNA
cccttgtcggatgatg

SEQ ID NO: 1864 - DNA, 16 bp, synthetic construct
  misc_feature 1..16: note = Description of Artificial Sequence: Syntheticoligonucleotide
  source 1..16: mol_type = other DNA
tccatgttgtggagga

SEQ ID NO: 1865 - DNA, 16 bp, synthetic construct
  misc_feature 1..16: note = Description of Artificial Sequence: Syntheticoligonucleotide
  source 1..16: mol_type = other DNA
ctcgctctccacccgc

SEQ ID NO: 1866 - DNA, 16 bp, synthetic construct
  misc_feature 1..16: note = Description of Artificial Sequence: Syntheticoligonucleotide
  source 1..16: mol_type = other DNA
accagtttggcccctg

SEQ ID NO: 1867 - DNA, 16 bp, synthetic construct
  misc_feature 1..16: note = Description of Artificial Sequence: Syntheticoligonucleotide
  source 1..16: mol_type = other DNA
atctgtgcgagcagct

SEQ ID NO: 1868 - DNA, 16 bp, synthetic construct
  misc_feature 1..16: note = Description of Artificial Sequence: Syntheticoligonucleotide
  source 1..16: mol_type = other DNA
tgcagctttgaggttg

SEQ ID NO: 1869 - DNA, 16 bp, synthetic construct
  misc_feature 1..16: note = Description of Artificial Sequence: Syntheticoligonucleotide
  source 1..16: mol_type = other DNA
aacaggccgtgtgtgt

SEQ ID NO: 1870 - DNA, 16 bp, synthetic construct
  misc_feature 1..16: note = Description of Artificial Sequence: Syntheticoligonucleotide
  source 1..16: mol_type = other DNA
atgagtagttcctctg

SEQ ID NO: 1871 - DNA, 16 bp, synthetic construct
  misc_feature 1..16: note = Description of Artificial Sequence: Syntheticoligonucleotide
  source 1..16: mol_type = other DNA
agaggagctcaccttc

SEQ ID NO: 1872 - DNA, 16 bp, synthetic construct
  misc_feature 1..16: note = Description of Artificial Sequence: Syntheticoligonucleotide
  source 1..16: mol_type = other DNA
tcccgttcctccccaa

SEQ ID NO: 1873 - DNA, 16 bp, synthetic construct
  misc_feature 1..16: note = Description of Artificial Sequence: Syntheticoligonucleotide
  source 1..16: mol_type = other DNA
acggtagctgggtaca

SEQ ID NO: 1874 - DNA, 16 bp, synthetic construct
  misc_feature 1..16: note = Description of Artificial Sequence: Syntheticoligonucleotide
  source 1..16: mol_type = other DNA
atcaattgatgaattc

SEQ ID NO: 1875 - DNA, 16 bp, synthetic construct
  misc_feature 1..16: note = Description of Artificial Sequence: Syntheticoligonucleotide
  source 1..16: mol_type = other DNA
agacagatggcgggag

SEQ ID NO: 1876 - DNA, 16 bp, synthetic construct
  misc_feature 1..16: note = Description of Artificial Sequence: Syntheticoligonucleotide
  source 1..16: mol_type = other DNA
gtacaaagctctaggc

SEQ ID NO: 1877 - DNA, 16 bp, synthetic construct
  misc_feature 1..16: note = Description of Artificial Sequence: Syntheticoligonucleotide
  source 1..16: mol_type = other DNA
gttaagtgctcagctt

SEQ ID NO: 1878 - DNA, 16 bp, synthetic construct
  misc_feature 1..16: note = Description of Artificial Sequence: Syntheticoligonucleotide
  source 1..16: mol_type = other DNA
gtccacacagctaaac

SEQ ID NO: 1879 - DNA, 16 bp, synthetic construct
  misc_feature 1..16: note = Description of Artificial Sequence: Syntheticoligonucleotide
  source 1..16: mol_type = other DNA
tgtgaggacagtcttg

SEQ ID NO: 1880 - DNA, 16 bp, synthetic construct
  misc_feature 1..16: note = Description of Artificial Sequence: Syntheticoligonucleotide
  source 1..16: mol_type = other DNA
taaaaatgcacgcccc

SEQ ID NO: 1881 - DNA, 16 bp, synthetic construct
  misc_feature 1..16: note = Description of Artificial Sequence: Syntheticoligonucleotide
  source 1..16: mol_type = other DNA
agtaatcacaagatgc

SEQ ID NO: 1882 - DNA, 16 bp, synthetic construct
  misc_feature 1..16: note = Description of Artificial Sequence: Syntheticoligonucleotide
  source 1..16: mol_type = other DNA
aataaagagctgtggc

SEQ ID NO: 1883 - DNA, 16 bp, synthetic construct
  misc_feature 1..16: note = Description of Artificial Sequence: Syntheticoligonucleotide
  source 1..16: mol_type = other DNA
gccaacataggtgaac

SEQ ID NO: 1884 - DNA, 16 bp, synthetic construct
  misc_feature 1..16: note = Description of Artificial Sequence: Syntheticoligonucleotide
  source 1..16: mol_type = other DNA
gttaagtgcctggcta

SEQ ID NO: 1885 - DNA, 16 bp, synthetic construct
  misc_feature 1..16: note = Description of Artificial Sequence: Syntheticoligonucleotide
  source 1..16: mol_type = other DNA
tataccctaaaatgcc

SEQ ID NO: 1886 - DNA, 16 bp, synthetic construct
  misc_feature 1..16: note = Description of Artificial Sequence: Syntheticoligonucleotide
  source 1..16: mol_type = other DNA
ttcaaactggaggacc

SEQ ID NO: 1887 - DNA, 16 bp, synthetic construct
  misc_feature 1..16: note = Description of Artificial Sequence: Syntheticoligonucleotide
  source 1..16: mol_type = other DNA
ctggctggttcaactg

SEQ ID NO: 1888 - DNA, 16 bp, synthetic construct
  misc_feature 1..16: note = Description of Artificial Sequence: Syntheticoligonucleotide
  source 1..16: mol_type = other DNA
gagatagggatacata

SEQ ID NO: 1889 - DNA, 16 bp, synthetic construct
  misc_feature 1..16: note = Description of Artificial Sequence: Syntheticoligonucleotide
  source 1..16: mol_type = other DNA
aatttgcccttctaca

SEQ ID NO: 1890 - DNA, 16 bp, synthetic construct
  misc_feature 1..16: note = Description of Artificial Sequence: Syntheticoligonucleotide
  source 1..16: mol_type = other DNA
acctatggagtccggg

SEQ ID NO: 1891 - DNA, 16 bp, synthetic construct
  misc_feature 1..16: note = Description of Artificial Sequence: Syntheticoligonucleotide
  source 1..16: mol_type = other DNA
ccttcgccaatacaga

SEQ ID NO: 1892 - DNA, 16 bp, synthetic construct
  misc_feature 1..16: note = Description of Artificial Sequence: Syntheticoligonucleotide
  source 1..16: mol_type = other DNA
tctcagtatgtgtagg

SEQ ID NO: 1893 - DNA, 16 bp, synthetic construct
  misc_feature 1..16: note = Description of Artificial Sequence: Syntheticoligonucleotide
  source 1..16: mol_type = other DNA
ccaggtttgaagctct

SEQ ID NO: 1894 - DNA, 16 bp, synthetic construct
  misc_feature 1..16: note = Description of Artificial Sequence: Syntheticoligonucleotide
  source 1..16: mol_type = other DNA
gaagagggcagatacc

SEQ ID NO: 1895 - DNA, 16 bp, synthetic construct
  misc_feature 1..16: note = Description of Artificial Sequence: Syntheticoligonucleotide
  source 1..16: mol_type = other DNA
tcacagcccccgactt

SEQ ID NO: 1896 - DNA, 16 bp, synthetic construct
  misc_feature 1..16: note = Description of Artificial Sequence: Syntheticoligonucleotide
  source 1..16: mol_type = other DNA
cctgactcagcaaagc

SEQ ID NO: 1897 - DNA, 16 bp, synthetic construct
  misc_feature 1..16: note = Description of Artificial Sequence: Syntheticoligonucleotide
  source 1..16: mol_type = other DNA
actaataccgatttcg

SEQ ID NO: 1898 - DNA, 16 bp, synthetic construct
  misc_feature 1..16: note = Description of Artificial Sequence: Syntheticoligonucleotide
  source 1..16: mol_type = other DNA
caggtattaagttctt

SEQ ID NO: 1899 - DNA, 16 bp, synthetic construct
  misc_feature 1..16: note = Description of Artificial Sequence: Syntheticoligonucleotide
  source 1..16: mol_type = other DNA
catagtgacttgagaa

SEQ ID NO: 1900 - DNA, 16 bp, synthetic construct
  misc_feature 1..16: note = Description of Artificial Sequence: Syntheticoligonucleotide
  source 1..16: mol_type = other DNA
tcaccttgaaagccct

SEQ ID NO: 1901 - DNA, 16 bp, synthetic construct
  misc_feature 1..16: note = Description of Artificial Sequence: Syntheticoligonucleotide
  source 1..16: mol_type = other DNA
atgcacggatccagca

SEQ ID NO: 1902 - DNA, 16 bp, synthetic construct
  misc_feature 1..16: note = Description of Artificial Sequence: Syntheticoligonucleotide
  source 1..16: mol_type = other DNA
gcaaaagtgcaggtgt

SEQ ID NO: 1903 - DNA, 16 bp, synthetic construct
  misc_feature 1..16: note = Description of Artificial Sequence: Syntheticoligonucleotide
  source 1..16: mol_type = other DNA
ctggatcaggagcagt

SEQ ID NO: 1904 - DNA, 16 bp, synthetic construct
  misc_feature 1..16: note = Description of Artificial Sequence: Syntheticoligonucleotide
  source 1..16: mol_type = other DNA
gactaggcatggactc

SEQ ID NO: 1905 - DNA, 16 bp, synthetic construct
  misc_feature 1..16: note = Description of Artificial Sequence: Syntheticoligonucleotide
  source 1..16: mol_type = other DNA
tctatgagggcaatgg

SEQ ID NO: 1906 - DNA, 16 bp, synthetic construct
  misc_feature 1..16: note = Description of Artificial Sequence: Syntheticoligonucleotide
  source 1..16: mol_type = other DNA
agatactcgaccacct

SEQ ID NO: 1907 - DNA, 16 bp, synthetic construct
  misc_feature 1..16: note = Description of Artificial Sequence: Syntheticoligonucleotide
  source 1..16: mol_type = other DNA
gcataagtcacagact

SEQ ID NO: 1908 - DNA, 16 bp, synthetic construct
  misc_feature 1..16: note = Description of Artificial Sequence: Syntheticoligonucleotide
  source 1..16: mol_type = other DNA
gctatgatcatccccc

SEQ ID NO: 1909 - DNA, 16 bp, synthetic construct
  misc_feature 1..16: note = Description of Artificial Sequence: Syntheticoligonucleotide
  source 1..16: mol_type = other DNA
caccgtccatacctgg

SEQ ID NO: 1910 - DNA, 16 bp, synthetic construct
  misc_feature 1..16: note = Description of Artificial Sequence: Syntheticoligonucleotide
  source 1..16: mol_type = other DNA
agacctgacacctttg

SEQ ID NO: 1911 - DNA, 16 bp, synthetic construct
  misc_feature 1..16: note = Description of Artificial Sequence: Syntheticoligonucleotide
  source 1..16: mol_type = other DNA
ccattcgcaggtgctg

SEQ ID NO: 1912 - DNA, 16 bp, synthetic construct
  misc_feature 1..16: note = Description of Artificial Sequence: Syntheticoligonucleotide
  source 1..16: mol_type = other DNA
tcacttgaggaagtcc

SEQ ID NO: 1913 - DNA, 16 bp, synthetic construct
  misc_feature 1..16: note = Description of Artificial Sequence: Syntheticoligonucleotide
  source 1..16: mol_type = other DNA
ttattatacatacgag

SEQ ID NO: 1914 - DNA, 16 bp, synthetic construct
  misc_feature 1..16: note = Description of Artificial Sequence: Syntheticoligonucleotide
  source 1..16: mol_type = other DNA
ggagctagaactttgg

SEQ ID NO: 1915 - DNA, 16 bp, synthetic construct
  misc_feature 1..16: note = Description of Artificial Sequence: Syntheticoligonucleotide
  source 1..16: mol_type = other DNA
gctcaatgctctgaat

SEQ ID NO: 1916 - DNA, 16 bp, synthetic construct
  misc_feature 1..16: note = Description of Artificial Sequence: Syntheticoligonucleotide
  source 1..16: mol_type = other DNA
gacagaaggttttgcg

SEQ ID NO: 1917 - DNA, 16 bp, synthetic construct
  misc_feature 1..16: note = Description of Artificial Sequence: Syntheticoligonucleotide
  source 1..16: mol_type = other DNA
gaggttaggttccctg

SEQ ID NO: 1918 - DNA, 16 bp, synthetic construct
  misc_feature 1..16: note = Description of Artificial Sequence: Syntheticoligonucleotide
  source 1..16: mol_type = other DNA
gttacatagctggtcc

SEQ ID NO: 1919 - DNA, 16 bp, synthetic construct
  misc_feature 1..16: note = Description of Artificial Sequence: Syntheticoligonucleotide
  source 1..16: mol_type = other DNA
gttgaatagggctctt

SEQ ID NO: 1920 - DNA, 16 bp, synthetic construct
  misc_feature 1..16: note = Description of Artificial Sequence: Syntheticoligonucleotide
  source 1..16: mol_type = other DNA
caaggaccattcttac

SEQ ID NO: 1921 - DNA, 16 bp, synthetic construct
  misc_feature 1..16: note = Description of Artificial Sequence: Syntheticoligonucleotide
  source 1..16: mol_type = other DNA
atcccgaaaggaagct

SEQ ID NO: 1922 - DNA, 16 bp, synthetic construct
  misc_feature 1..16: note = Description of Artificial Sequence: Syntheticoligonucleotide
  source 1..16: mol_type = other DNA
tagcagggtccctccc

SEQ ID NO: 1923 - DNA, 16 bp, synthetic construct
  misc_feature 1..16: note = Description of Artificial Sequence: Syntheticoligonucleotide
  source 1..16: mol_type = other DNA
ctcgggcgaatccacc

SEQ ID NO: 1924 - DNA, 16 bp, synthetic construct
  misc_feature 1..16: note = Description of Artificial Sequence: Syntheticoligonucleotide
  source 1..16: mol_type = other DNA
agtaacttgcacacca

SEQ ID NO: 1925 - DNA, 16 bp, synthetic construct
  misc_feature 1..16: note = Description of Artificial Sequence: Syntheticoligonucleotide
  source 1..16: mol_type = other DNA
gagcacctgacataag

SEQ ID NO: 1926 - DNA, 16 bp, synthetic construct
  misc_feature 1..16: note = Description of Artificial Sequence: Syntheticoligonucleotide
  source 1..16: mol_type = other DNA
cccctacaaggtgagt

SEQ ID NO: 1927 - DNA, 16 bp, synthetic construct
  misc_feature 1..16: note = Description of Artificial Sequence: Syntheticoligonucleotide
  source 1..16: mol_type = other DNA
cctgcttacccagcgg

SEQ ID NO: 1928 - DNA, 16 bp, synthetic construct
  misc_feature 1..16: note = Description of Artificial Sequence: Syntheticoligonucleotide
  source 1..16: mol_type = other DNA
taggtttagggtcaga

SEQ ID NO: 1929 - DNA, 16 bp, synthetic construct
  misc_feature 1..16: note = Description of Artificial Sequence: Syntheticoligonucleotide
  source 1..16: mol_type = other DNA
ttggcataaaggctgg

SEQ ID NO: 1930 - DNA, 16 bp, synthetic construct
  misc_feature 1..16: note = Description of Artificial Sequence: Syntheticoligonucleotide
  source 1..16: mol_type = other DNA
ggtgaggttcaggttt

SEQ ID NO: 1931 - DNA, 16 bp, synthetic construct
  misc_feature 1..16: note = Description of Artificial Sequence: Syntheticoligonucleotide
  source 1..16: mol_type = other DNA
aggatgaggttagttg

SEQ ID NO: 1932 - DNA, 16 bp, synthetic construct
  misc_feature 1..16: note = Description of Artificial Sequence: Syntheticoligonucleotide
  source 1..16: mol_type = other DNA
ggccaacttaagggtc

SEQ ID NO: 1933 - DNA, 16 bp, synthetic construct
  misc_feature 1..16: note = Description of Artificial Sequence: Syntheticoligonucleotide
  source 1..16: mol_type = other DNA
agggacaggactagat

SEQ ID NO: 1934 - DNA, 16 bp, synthetic construct
  misc_feature 1..16: note = Description of Artificial Sequence: Syntheticoligonucleotide
  source 1..16: mol_type = other DNA
aaaaccacgctgtacg

SEQ ID NO: 1935 - DNA, 16 bp, synthetic construct
  misc_feature 1..16: note = Description of Artificial Sequence: Syntheticoligonucleotide
  source 1..16: mol_type = other DNA
tgggcgaggctcctgg

SEQ ID NO: 1936 - DNA, 16 bp, synthetic construct
  misc_feature 1..16: note = Description of Artificial Sequence: Syntheticoligonucleotide
  source 1..16: mol_type = other DNA
aggcatgggccccgcc

SEQ ID NO: 1937 - DNA, 16 bp, synthetic construct
  misc_feature 1..16: note = Description of Artificial Sequence: Syntheticoligonucleotide
  source 1..16: mol_type = other DNA
ccaccgttgagagctg

SEQ ID NO: 1938 - DNA, 16 bp, synthetic construct
  misc_feature 1..16: note = Description of Artificial Sequence: Syntheticoligonucleotide
  source 1..16: mol_type = other DNA
gtgcactgggatttgg

SEQ ID NO: 1939 - DNA, 16 bp, synthetic construct
  misc_feature 1..16: note = Description of Artificial Sequence: Syntheticoligonucleotide
  source 1..16: mol_type = other DNA
cagtgcttgaggaagt

SEQ ID NO: 1940 - DNA, 16 bp, synthetic construct
  misc_feature 1..16: note = Description of Artificial Sequence: Syntheticoligonucleotide
  source 1..16: mol_type = other DNA
gcccttgtcggatgat

SEQ ID NO: 1941 - DNA, 16 bp, synthetic construct
  misc_feature 1..16: note = Description of Artificial Sequence: Syntheticoligonucleotide
  source 1..16: mol_type = other DNA
tagtccatgttgtgga

SEQ ID NO: 1942 - DNA, 16 bp, synthetic construct
  misc_feature 1..16: note = Description of Artificial Sequence: Syntheticoligonucleotide
  source 1..16: mol_type = other DNA
tctcgctctccacccg

SEQ ID NO: 1943 - DNA, 16 bp, synthetic construct
  misc_feature 1..16: note = Description of Artificial Sequence: Syntheticoligonucleotide
  source 1..16: mol_type = other DNA
tcccaccagtttggcc

SEQ ID NO: 1944 - DNA, 16 bp, synthetic construct
  misc_feature 1..16: note = Description of Artificial Sequence: Syntheticoligonucleotide
  source 1..16: mol_type = other DNA
aatctgtgcgagcagc

SEQ ID NO: 1945 - DNA, 16 bp, synthetic construct
  misc_feature 1..16: note = Description of Artificial Sequence: Syntheticoligonucleotide
  source 1..16: mol_type = other DNA
gatgcagctttgaggt

SEQ ID NO: 1946 - DNA, 16 bp, synthetic construct
  misc_feature 1..16: note = Description of Artificial Sequence: Syntheticoligonucleotide
  source 1..16: mol_type = other DNA
tgaattctaacaggcc

SEQ ID NO: 1947 - DNA, 16 bp, synthetic construct
  misc_feature 1..16: note = Description of Artificial Sequence: Syntheticoligonucleotide
  source 1..16: mol_type = other DNA
gccttggatcccaaat

SEQ ID NO: 1948 - DNA, 16 bp, synthetic construct
  misc_feature 1..16: note = Description of Artificial Sequence: Syntheticoligonucleotide
  source 1..16: mol_type = other DNA
cagaggagctcacctt

SEQ ID NO: 1949 - DNA, 16 bp, synthetic construct
  misc_feature 1..16: note = Description of Artificial Sequence: Syntheticoligonucleotide
  source 1..16: mol_type = other DNA
catcccgttcctcccc

SEQ ID NO: 1950 - DNA, 16 bp, synthetic construct
  misc_feature 1..16: note = Description of Artificial Sequence: Syntheticoligonucleotide
  source 1..16: mol_type = other DNA
cacggtagctgggtac

SEQ ID NO: 1951 - DNA, 16 bp, synthetic construct
  misc_feature 1..16: note = Description of Artificial Sequence: Syntheticoligonucleotide
  source 1..16: mol_type = other DNA
cgtatcaattgatgaa

SEQ ID NO: 1952 - DNA, 16 bp, synthetic construct
  misc_feature 1..16: note = Description of Artificial Sequence: Syntheticoligonucleotide
  source 1..16: mol_type = other DNA
acagacagatggcggg

SEQ ID NO: 1953 - DNA, 16 bp, synthetic construct
  misc_feature 1..16: note = Description of Artificial Sequence: Syntheticoligonucleotide
  source 1..16: mol_type = other DNA
tactattattaaacgc

SEQ ID NO: 1954 - DNA, 16 bp, synthetic construct
  misc_feature 1..16: note = Description of Artificial Sequence: Syntheticoligonucleotide
  source 1..16: mol_type = other DNA
agttaagtgctcagct

SEQ ID NO: 1955 - DNA, 16 bp, synthetic construct
  misc_feature 1..16: note = Description of Artificial Sequence: Syntheticoligonucleotide
  source 1..16: mol_type = other DNA
aggtccacacagctaa

SEQ ID NO: 1956 - DNA, 16 bp, synthetic construct
  misc_feature 1..16: note = Description of Artificial Sequence: Syntheticoligonucleotide
  source 1..16: mol_type = other DNA
atgtgaggacagtctt

SEQ ID NO: 1957 - DNA, 16 bp, synthetic construct
  misc_feature 1..16: note = Description of Artificial Sequence: Syntheticoligonucleotide
  source 1..16: mol_type = other DNA
ttaaaaatgcacgccc

SEQ ID NO: 1958 - DNA, 16 bp, synthetic construct
  misc_feature 1..16: note = Description of Artificial Sequence: Syntheticoligonucleotide
  source 1..16: mol_type = other DNA
gccaatgaatagtaaa

SEQ ID NO: 1959 - DNA, 16 bp, synthetic construct
  misc_feature 1..16: note = Description of Artificial Sequence: Syntheticoligonucleotide
  source 1..16: mol_type = other DNA
tccaaataaagagctg

SEQ ID NO: 1960 - DNA, 16 bp, synthetic construct
  misc_feature 1..16: note = Description of Artificial Sequence: Syntheticoligonucleotide
  source 1..16: mol_type = other DNA
agccaacataggtgaa

SEQ ID NO: 1961 - DNA, 16 bp, synthetic construct
  misc_feature 1..16: note = Description of Artificial Sequence: Syntheticoligonucleotide
  source 1..16: mol_type = other DNA
cagtacatatgaggaa

SEQ ID NO: 1962 - DNA, 16 bp, synthetic construct
  misc_feature 1..16: note = Description of Artificial Sequence: Syntheticoligonucleotide
  source 1..16: mol_type = other DNA
catataccctaaaatg

SEQ ID NO: 1963 - DNA, 16 bp, synthetic construct
  misc_feature 1..16: note = Description of Artificial Sequence: Syntheticoligonucleotide
  source 1..16: mol_type = other DNA
tttcaaactggaggac

SEQ ID NO: 1964 - DNA, 16 bp, synthetic construct
  misc_feature 1..16: note = Description of Artificial Sequence: Syntheticoligonucleotide
  source 1..16: mol_type = other DNA
tctctggctggttcaa

SEQ ID NO: 1965 - DNA, 16 bp, synthetic construct
  misc_feature 1..16: note = Description of Artificial Sequence: Syntheticoligonucleotide
  source 1..16: mol_type = other DNA
agagatagggatacat

SEQ ID NO: 1966 - DNA, 16 bp, synthetic construct
  misc_feature 1..16: note = Description of Artificial Sequence: Syntheticoligonucleotide
  source 1..16: mol_type = other DNA
caatttgcccttctac

SEQ ID NO: 1967 - DNA, 16 bp, synthetic construct
  misc_feature 1..16: note = Description of Artificial Sequence: Syntheticoligonucleotide
  source 1..16: mol_type = other DNA
gacctatggagtccgg

SEQ ID NO: 1968 - DNA, 16 bp, synthetic construct
  misc_feature 1..16: note = Description of Artificial Sequence: Syntheticoligonucleotide
  source 1..16: mol_type = other DNA
gccttcgccaatacag

SEQ ID NO: 1969 - DNA, 16 bp, synthetic construct
  misc_feature 1..16: note = Description of Artificial Sequence: Syntheticoligonucleotide
  source 1..16: mol_type = other DNA
tcccaaagtctcagta

SEQ ID NO: 1970 - DNA, 16 bp, synthetic construct
  misc_feature 1..16: note = Description of Artificial Sequence: Syntheticoligonucleotide
  source 1..16: mol_type = other DNA
cccaggtttgaagctc

SEQ ID NO: 1971 - DNA, 16 bp, synthetic construct
  misc_feature 1..16: note = Description of Artificial Sequence: Syntheticoligonucleotide
  source 1..16: mol_type = other DNA
agaagagggcagatac

SEQ ID NO: 1972 - DNA, 16 bp, synthetic construct
  misc_feature 1..16: note = Description of Artificial Sequence: Syntheticoligonucleotide
  source 1..16: mol_type = other DNA
tgtcacagcccccgac

SEQ ID NO: 1973 - DNA, 16 bp, synthetic construct
  misc_feature 1..16: note = Description of Artificial Sequence: Syntheticoligonucleotide
  source 1..16: mol_type = other DNA
gtgggatggcctgact

SEQ ID NO: 1974 - DNA, 16 bp, synthetic construct
  misc_feature 1..16: note = Description of Artificial Sequence: Syntheticoligonucleotide
  source 1..16: mol_type = other DNA
aactaataccgatttc

SEQ ID NO: 1975 - DNA, 16 bp, synthetic construct
  misc_feature 1..16: note = Description of Artificial Sequence: Syntheticoligonucleotide
  source 1..16: mol_type = other DNA
ccaggtattaagttct

SEQ ID NO: 1976 - DNA, 16 bp, synthetic construct
  misc_feature 1..16: note = Description of Artificial Sequence: Syntheticoligonucleotide
  source 1..16: mol_type = other DNA
ccatagtgacttgaga

SEQ ID NO: 1977 - DNA, 16 bp, synthetic construct
  misc_feature 1..16: note = Description of Artificial Sequence: Syntheticoligonucleotide
  source 1..16: mol_type = other DNA
ctcaccttgaaagccc

SEQ ID NO: 1978 - DNA, 16 bp, synthetic construct
  misc_feature 1..16: note = Description of Artificial Sequence: Syntheticoligonucleotide
  source 1..16: mol_type = other DNA
atcatgcacggatcca

SEQ ID NO: 1979 - DNA, 16 bp, synthetic construct
  misc_feature 1..16: note = Description of Artificial Sequence: Syntheticoligonucleotide
  source 1..16: mol_type = other DNA
tgcaaaagtgcaggtg

SEQ ID NO: 1980 - DNA, 16 bp, synthetic construct
  misc_feature 1..16: note = Description of Artificial Sequence: Syntheticoligonucleotide
  source 1..16: mol_type = other DNA
tctgaagctggatcag

SEQ ID NO: 1981 - DNA, 16 bp, synthetic construct
  misc_feature 1..16: note = Description of Artificial Sequence: Syntheticoligonucleotide
  source 1..16: mol_type = other DNA
tgactaggcatggact

SEQ ID NO: 1982 - DNA, 16 bp, synthetic construct
  misc_feature 1..16: note = Description of Artificial Sequence: Syntheticoligonucleotide
  source 1..16: mol_type = other DNA
cctctatgagggcaat

SEQ ID NO: 1983 - DNA, 16 bp, synthetic construct
  misc_feature 1..16: note = Description of Artificial Sequence: Syntheticoligonucleotide
  source 1..16: mol_type = other DNA
atgagatactcgacca

SEQ ID NO: 1984 - DNA, 16 bp, synthetic construct
  misc_feature 1..16: note = Description of Artificial Sequence: Syntheticoligonucleotide
  source 1..16: mol_type = other DNA
ctgcataagtcacaga

SEQ ID NO: 1985 - DNA, 16 bp, synthetic construct
  misc_feature 1..16: note = Description of Artificial Sequence: Syntheticoligonucleotide
  source 1..16: mol_type = other DNA
atgctatgatcatccc

SEQ ID NO: 1986 - DNA, 16 bp, synthetic construct
  misc_feature 1..16: note = Description of Artificial Sequence: Syntheticoligonucleotide
  source 1..16: mol_type = other DNA
attcaccgtccatacc

SEQ ID NO: 1987 - DNA, 16 bp, synthetic construct
  misc_feature 1..16: note = Description of Artificial Sequence: Syntheticoligonucleotide
  source 1..16: mol_type = other DNA
gagacctgacaccttt

SEQ ID NO: 1988 - DNA, 16 bp, synthetic construct
  misc_feature 1..16: note = Description of Artificial Sequence: Syntheticoligonucleotide
  source 1..16: mol_type = other DNA
gccattcgcaggtgct

SEQ ID NO: 1989 - DNA, 16 bp, synthetic construct
  misc_feature 1..16: note = Description of Artificial Sequence: Syntheticoligonucleotide
  source 1..16: mol_type = other DNA
ctcacttgaggaagtc

SEQ ID NO: 1990 - DNA, 16 bp, synthetic construct
  misc_feature 1..16: note = Description of Artificial Sequence: Syntheticoligonucleotide
  source 1..16: mol_type = other DNA
aataacagcacaaacg

SEQ ID NO: 1991 - DNA, 16 bp, synthetic construct
  misc_feature 1..16: note = Description of Artificial Sequence: Syntheticoligonucleotide
  source 1..16: mol_type = other DNA
aggagctagaactttg

SEQ ID NO: 1992 - DNA, 16 bp, synthetic construct
  misc_feature 1..16: note = Description of Artificial Sequence: Syntheticoligonucleotide
  source 1..16: mol_type = other DNA
ccacgacaggcctggt

SEQ ID NO: 1993 - DNA, 16 bp, synthetic construct
  misc_feature 1..16: note = Description of Artificial Sequence: Syntheticoligonucleotide
  source 1..16: mol_type = other DNA
gtggacagaaggtttt

SEQ ID NO: 1994 - DNA, 16 bp, synthetic construct
  misc_feature 1..16: note = Description of Artificial Sequence: Syntheticoligonucleotide
  source 1..16: mol_type = other DNA
tgaggttaggttccct

SEQ ID NO: 1995 - DNA, 16 bp, synthetic construct
  misc_feature 1..16: note = Description of Artificial Sequence: Syntheticoligonucleotide
  source 1..16: mol_type = other DNA
gcaggttacatagctg

SEQ ID NO: 1996 - DNA, 16 bp, synthetic construct
  misc_feature 1..16: note = Description of Artificial Sequence: Syntheticoligonucleotide
  source 1..16: mol_type = other DNA
cgtatgtggccactga

SEQ ID NO: 1997 - DNA, 16 bp, synthetic construct
  misc_feature 1..16: note = Description of Artificial Sequence: Syntheticoligonucleotide
  source 1..16: mol_type = other DNA
gcaaggaccattctta

SEQ ID NO: 1998 - DNA, 16 bp, synthetic construct
  misc_feature 1..16: note = Description of Artificial Sequence: Syntheticoligonucleotide
  source 1..16: mol_type = other DNA
cacggacatcccgaaa

SEQ ID NO: 1999 - DNA, 16 bp, synthetic construct
  misc_feature 1..16: note = Description of Artificial Sequence: Syntheticoligonucleotide
  source 1..16: mol_type = other DNA
ttagcagggtccctcc

SEQ ID NO: 2000 - DNA, 16 bp, synthetic construct
  misc_feature 1..16: note = Description of Artificial Sequence: Syntheticoligonucleotide
  source 1..16: mol_type = other DNA
gctcgggcgaatccac

SEQ ID NO: 2001 - DNA, 16 bp, synthetic construct
  misc_feature 1..16: note = Description of Artificial Sequence: Syntheticoligonucleotide
  source 1..16: mol_type = other DNA
ggagtaacttgcacac

SEQ ID NO: 2002 - DNA, 16 bp, synthetic construct
  misc_feature 1..16: note = Description of Artificial Sequence: Syntheticoligonucleotide
  source 1..16: mol_type = other DNA
gtactgtttgctgagc

SEQ ID NO: 2003 - DNA, 16 bp, synthetic construct
  misc_feature 1..16: note = Description of Artificial Sequence: Syntheticoligonucleotide
  source 1..16: mol_type = other DNA
agctagctccctgtcc

SEQ ID NO: 2004 - DNA, 16 bp, synthetic construct
  misc_feature 1..16: note = Description of Artificial Sequence: Syntheticoligonucleotide
  source 1..16: mol_type = other DNA
ccctgcttacccagcg

SEQ ID NO: 2005 - DNA, 16 bp, synthetic construct
  misc_feature 1..16: note = Description of Artificial Sequence: Syntheticoligonucleotide
  source 1..16: mol_type = other DNA
gaggtggacatctgga

SEQ ID NO: 2006 - DNA, 16 bp, synthetic construct
  misc_feature 1..16: note = Description of Artificial Sequence: Syntheticoligonucleotide
  source 1..16: mol_type = other DNA
ttgggttggcataaag

SEQ ID NO: 2007 - DNA, 16 bp, synthetic construct
  misc_feature 1..16: note = Description of Artificial Sequence: Syntheticoligonucleotide
  source 1..16: mol_type = other DNA
ctggtatcatgtaggg

SEQ ID NO: 2008 - DNA, 16 bp, synthetic construct
  misc_feature 1..16: note = Description of Artificial Sequence: Syntheticoligonucleotide
  source 1..16: mol_type = other DNA
aaggatgaggttagtt

SEQ ID NO: 2009 - DNA, 16 bp, synthetic construct
  misc_feature 1..16: note = Description of Artificial Sequence: Syntheticoligonucleotide
  source 1..16: mol_type = other DNA
aggccaacttaagggt

SEQ ID NO: 2010 - DNA, 16 bp, synthetic construct
  misc_feature 1..16: note = Description of Artificial Sequence: Syntheticoligonucleotide
  source 1..16: mol_type = other DNA
atcagggacaggacta

SEQ ID NO: 2011 - DNA, 16 bp, synthetic construct
  misc_feature 1..16: note = Description of Artificial Sequence: Syntheticoligonucleotide
  source 1..16: mol_type = other DNA
ccgagaagaaaaacca

SEQ ID NO: 2012 - DNA, 16 bp, synthetic construct
  misc_feature 1..16: note = Description of Artificial Sequence: Syntheticoligonucleotide
  source 1..16: mol_type = other DNA
ctgggcgaggctcctg

SEQ ID NO: 2013 - DNA, 16 bp, synthetic construct
  misc_feature 1..16: note = Description of Artificial Sequence: Syntheticoligonucleotide
  source 1..16: mol_type = other DNA
gaggcatgggccccgc

SEQ ID NO: 2014 - DNA, 16 bp, synthetic construct
  misc_feature 1..16: note = Description of Artificial Sequence: Syntheticoligonucleotide
  source 1..16: mol_type = other DNA
tccaccgttgagagct

SEQ ID NO: 2015 - DNA, 16 bp, synthetic construct
  misc_feature 1..16: note = Description of Artificial Sequence: Syntheticoligonucleotide
  source 1..16: mol_type = other DNA
cttcctgggtgcactg

SEQ ID NO: 2016 - DNA, 16 bp, synthetic construct
  misc_feature 1..16: note = Description of Artificial Sequence: Syntheticoligonucleotide
  source 1..16: mol_type = other DNA
cgcctggcagtgcttg

SEQ ID NO: 2017 - DNA, 16 bp, synthetic construct
  misc_feature 1..16: note = Description of Artificial Sequence: Syntheticoligonucleotide
  source 1..16: mol_type = other DNA
gagcccttgtcggatg

SEQ ID NO: 2018 - DNA, 16 bp, synthetic construct
  misc_feature 1..16: note = Description of Artificial Sequence: Syntheticoligonucleotide
  source 1..16: mol_type = other DNA
agtagtccatgttgtg

SEQ ID NO: 2019 - DNA, 16 bp, synthetic construct
  misc_feature 1..16: note = Description of Artificial Sequence: Syntheticoligonucleotide
  source 1..16: mol_type = other DNA
cttctcgctctccacc

SEQ ID NO: 2020 - DNA, 16 bp, synthetic construct
  misc_feature 1..16: note = Description of Artificial Sequence: Syntheticoligonucleotide
  source 1..16: mol_type = other DNA
gcctcccaccagtttg

SEQ ID NO: 2021 - DNA, 16 bp, synthetic construct
  misc_feature 1..16: note = Description of Artificial Sequence: Syntheticoligonucleotide
  source 1..16: mol_type = other DNA
taatctgtgcgagcag

SEQ ID NO: 2022 - DNA, 16 bp, synthetic construct
  misc_feature 1..16: note = Description of Artificial Sequence: Syntheticoligonucleotide
  source 1..16: mol_type = other DNA
tgatgcagctttgagg

SEQ ID NO: 2023 - DNA, 16 bp, synthetic construct
  misc_feature 1..16: note = Description of Artificial Sequence: Syntheticoligonucleotide
  source 1..16: mol_type = other DNA
tgagatacacaggtga

SEQ ID NO: 2024 - DNA, 16 bp, synthetic construct
  misc_feature 1..16: note = Description of Artificial Sequence: Syntheticoligonucleotide
  source 1..16: mol_type = other DNA
ggccttggatcccaaa

SEQ ID NO: 2025 - DNA, 16 bp, synthetic construct
  misc_feature 1..16: note = Description of Artificial Sequence: Syntheticoligonucleotide
  source 1..16: mol_type = other DNA
tcagaggagctcacct

SEQ ID NO: 2026 - DNA, 16 bp, synthetic construct
  misc_feature 1..16: note = Description of Artificial Sequence: Syntheticoligonucleotide
  source 1..16: mol_type = other DNA
acatcccgttcctccc

SEQ ID NO: 2027 - DNA, 16 bp, synthetic construct
  misc_feature 1..16: note = Description of Artificial Sequence: Syntheticoligonucleotide
  source 1..16: mol_type = other DNA
tcacggtagctgggta

SEQ ID NO: 2028 - DNA, 16 bp, synthetic construct
  misc_feature 1..16: note = Description of Artificial Sequence: Syntheticoligonucleotide
  source 1..16: mol_type = other DNA
atcctatccatctacg

SEQ ID NO: 2029 - DNA, 16 bp, synthetic construct
  misc_feature 1..16: note = Description of Artificial Sequence: Syntheticoligonucleotide
  source 1..16: mol_type = other DNA
agtgtagcgacagaca

SEQ ID NO: 2030 - DNA, 16 bp, synthetic construct
  misc_feature 1..16: note = Description of Artificial Sequence: Syntheticoligonucleotide
  source 1..16: mol_type = other DNA
ttactattattaaacg

SEQ ID NO: 2031 - DNA, 16 bp, synthetic construct
  misc_feature 1..16: note = Description of Artificial Sequence: Syntheticoligonucleotide
  source 1..16: mol_type = other DNA
cagttaagtgctcagc

SEQ ID NO: 2032 - DNA, 16 bp, synthetic construct
  misc_feature 1..16: note = Description of Artificial Sequence: Syntheticoligonucleotide
  source 1..16: mol_type = other DNA
gggtaggtccacacag

SEQ ID NO: 2033 - DNA, 16 bp, synthetic construct
  misc_feature 1..16: note = Description of Artificial Sequence: Syntheticoligonucleotide
  source 1..16: mol_type = other DNA
gatgtgaggacagtct

SEQ ID NO: 2034 - DNA, 16 bp, synthetic construct
  misc_feature 1..16: note = Description of Artificial Sequence: Syntheticoligonucleotide
  source 1..16: mol_type = other DNA
tttaaaaatgcacgcc

SEQ ID NO: 2035 - DNA, 16 bp, synthetic construct
  misc_feature 1..16: note = Description of Artificial Sequence: Syntheticoligonucleotide
  source 1..16: mol_type = other DNA
ggccaatgaatagtaa

SEQ ID NO: 2036 - DNA, 16 bp, synthetic construct
  misc_feature 1..16: note = Description of Artificial Sequence: Syntheticoligonucleotide
  source 1..16: mol_type = other DNA
ggttaataaccattcc

SEQ ID NO: 2037 - DNA, 16 bp, synthetic construct
  misc_feature 1..16: note = Description of Artificial Sequence: Syntheticoligonucleotide
  source 1..16: mol_type = other DNA
aagccaacataggtga

SEQ ID NO: 2038 - DNA, 16 bp, synthetic construct
  misc_feature 1..16: note = Description of Artificial Sequence: Syntheticoligonucleotide
  source 1..16: mol_type = other DNA
tataaccattgcagta

SEQ ID NO: 2039 - DNA, 16 bp, synthetic construct
  misc_feature 1..16: note = Description of Artificial Sequence: Syntheticoligonucleotide
  source 1..16: mol_type = other DNA
catcatcatataccct

SEQ ID NO: 2040 - DNA, 16 bp, synthetic construct
  misc_feature 1..16: note = Description of Artificial Sequence: Syntheticoligonucleotide
  source 1..16: mol_type = other DNA
ggcatttcaaactgga

SEQ ID NO: 2041 - DNA, 16 bp, synthetic construct
  misc_feature 1..16: note = Description of Artificial Sequence: Syntheticoligonucleotide
  source 1..16: mol_type = other DNA
acatttgctggtctct

SEQ ID NO: 2042 - DNA, 16 bp, synthetic construct
  misc_feature 1..16: note = Description of Artificial Sequence: Syntheticoligonucleotide
  source 1..16: mol_type = other DNA
ctgagagatagggata

SEQ ID NO: 2043 - DNA, 16 bp, synthetic construct
  misc_feature 1..16: note = Description of Artificial Sequence: Syntheticoligonucleotide
  source 1..16: mol_type = other DNA
cctgagatctctggtc

SEQ ID NO: 2044 - DNA, 16 bp, synthetic construct
  misc_feature 1..16: note = Description of Artificial Sequence: Syntheticoligonucleotide
  source 1..16: mol_type = other DNA
cctgacctatggagtc

SEQ ID NO: 2045 - DNA, 16 bp, synthetic construct
  misc_feature 1..16: note = Description of Artificial Sequence: Syntheticoligonucleotide
  source 1..16: mol_type = other DNA
cgccagagatggcaac

SEQ ID NO: 2046 - DNA, 16 bp, synthetic construct
  misc_feature 1..16: note = Description of Artificial Sequence: Syntheticoligonucleotide
  source 1..16: mol_type = other DNA
tctacggtcccaaagt

SEQ ID NO: 2047 - DNA, 16 bp, synthetic construct
  misc_feature 1..16: note = Description of Artificial Sequence: Syntheticoligonucleotide
  source 1..16: mol_type = other DNA
acccaggtttgaagct

SEQ ID NO: 2048 - DNA, 16 bp, synthetic construct
  misc_feature 1..16: note = Description of Artificial Sequence: Syntheticoligonucleotide
  source 1..16: mol_type = other DNA
accacggaggaagaga

SEQ ID NO: 2049 - DNA, 16 bp, synthetic construct
  misc_feature 1..16: note = Description of Artificial Sequence: Syntheticoligonucleotide
  source 1..16: mol_type = other DNA
cctgttgtcacagccc

SEQ ID NO: 2050 - DNA, 16 bp, synthetic construct
  misc_feature 1..16: note = Description of Artificial Sequence: Syntheticoligonucleotide
  source 1..16: mol_type = other DNA
atgtgggatggcctga

SEQ ID NO: 2051 - DNA, 16 bp, synthetic construct
  misc_feature 1..16: note = Description of Artificial Sequence: Syntheticoligonucleotide
  source 1..16: mol_type = other DNA
caaactaataccgatt

SEQ ID NO: 2052 - DNA, 16 bp, synthetic construct
  misc_feature 1..16: note = Description of Artificial Sequence: Syntheticoligonucleotide
  source 1..16: mol_type = other DNA
tccaggtattaagttc

SEQ ID NO: 2053 - DNA, 16 bp, synthetic construct
  misc_feature 1..16: note = Description of Artificial Sequence: Syntheticoligonucleotide
  source 1..16: mol_type = other DNA
cccatagtgacttgag

SEQ ID NO: 2054 - DNA, 16 bp, synthetic construct
  misc_feature 1..16: note = Description of Artificial Sequence: Syntheticoligonucleotide
  source 1..16: mol_type = other DNA
tattgtcctcaccttg

SEQ ID NO: 2055 - DNA, 16 bp, synthetic construct
  misc_feature 1..16: note = Description of Artificial Sequence: Syntheticoligonucleotide
  source 1..16: mol_type = other DNA
gatcatgcacggatcc

SEQ ID NO: 2056 - DNA, 16 bp, synthetic construct
  misc_feature 1..16: note = Description of Artificial Sequence: Syntheticoligonucleotide
  source 1..16: mol_type = other DNA
gtgcaaaagtgcaggt

SEQ ID NO: 2057 - DNA, 16 bp, synthetic construct
  misc_feature 1..16: note = Description of Artificial Sequence: Syntheticoligonucleotide
  source 1..16: mol_type = other DNA
atctgaagctggatca

SEQ ID NO: 2058 - DNA, 16 bp, synthetic construct
  misc_feature 1..16: note = Description of Artificial Sequence: Syntheticoligonucleotide
  source 1..16: mol_type = other DNA
agtgactaggcatgga

SEQ ID NO: 2059 - DNA, 16 bp, synthetic construct
  misc_feature 1..16: note = Description of Artificial Sequence: Syntheticoligonucleotide
  source 1..16: mol_type = other DNA
tcctctatgagggcaa

SEQ ID NO: 2060 - DNA, 16 bp, synthetic construct
  misc_feature 1..16: note = Description of Artificial Sequence: Syntheticoligonucleotide
  source 1..16: mol_type = other DNA
tatgagatactcgacc

SEQ ID NO: 2061 - DNA, 16 bp, synthetic construct
  misc_feature 1..16: note = Description of Artificial Sequence: Syntheticoligonucleotide
  source 1..16: mol_type = other DNA
caacatctgcataagt

SEQ ID NO: 2062 - DNA, 16 bp, synthetic construct
  misc_feature 1..16: note = Description of Artificial Sequence: Syntheticoligonucleotide
  source 1..16: mol_type = other DNA
gatgctatgatcatcc

SEQ ID NO: 2063 - DNA, 16 bp, synthetic construct
  misc_feature 1..16: note = Description of Artificial Sequence: Syntheticoligonucleotide
  source 1..16: mol_type = other DNA
ccattcaccgtccata

SEQ ID NO: 2064 - DNA, 16 bp, synthetic construct
  misc_feature 1..16: note = Description of Artificial Sequence: Syntheticoligonucleotide
  source 1..16: mol_type = other DNA
tgagacctgacacctt

SEQ ID NO: 2065 - DNA, 16 bp, synthetic construct
  misc_feature 1..16: note = Description of Artificial Sequence: Syntheticoligonucleotide
  source 1..16: mol_type = other DNA
ggccattcgcaggtgc

SEQ ID NO: 2066 - DNA, 16 bp, synthetic construct
  misc_feature 1..16: note = Description of Artificial Sequence: Syntheticoligonucleotide
  source 1..16: mol_type = other DNA
actcacttgaggaagt

SEQ ID NO: 2067 - DNA, 16 bp, synthetic construct
  misc_feature 1..16: note = Description of Artificial Sequence: Syntheticoligonucleotide
  source 1..16: mol_type = other DNA
gatcaagacacttaac

SEQ ID NO: 2068 - DNA, 16 bp, synthetic construct
  misc_feature 1..16: note = Description of Artificial Sequence: Syntheticoligonucleotide
  source 1..16: mol_type = other DNA
gaggagctagaacttt

SEQ ID NO: 2069 - DNA, 16 bp, synthetic construct
  misc_feature 1..16: note = Description of Artificial Sequence: Syntheticoligonucleotide
  source 1..16: mol_type = other DNA
accacgacaggcctgg

SEQ ID NO: 2070 - DNA, 16 bp, synthetic construct
  misc_feature 1..16: note = Description of Artificial Sequence: Syntheticoligonucleotide
  source 1..16: mol_type = other DNA
atggtggacagaaggt

SEQ ID NO: 2071 - DNA, 16 bp, synthetic construct
  misc_feature 1..16: note = Description of Artificial Sequence: Syntheticoligonucleotide
  source 1..16: mol_type = other DNA
gtgaggttaggttccc

SEQ ID NO: 2072 - DNA, 16 bp, synthetic construct
  misc_feature 1..16: note = Description of Artificial Sequence: Syntheticoligonucleotide
  source 1..16: mol_type = other DNA
ctgcaggttacatagc

SEQ ID NO: 2073 - DNA, 16 bp, synthetic construct
  misc_feature 1..16: note = Description of Artificial Sequence: Syntheticoligonucleotide
  source 1..16: mol_type = other DNA
ttagagcacaggtgcg

SEQ ID NO: 2074 - DNA, 16 bp, synthetic construct
  misc_feature 1..16: note = Description of Artificial Sequence: Syntheticoligonucleotide
  source 1..16: mol_type = other DNA
tgcaaggaccattctt

SEQ ID NO: 2075 - DNA, 16 bp, synthetic construct
  misc_feature 1..16: note = Description of Artificial Sequence: Syntheticoligonucleotide
  source 1..16: mol_type = other DNA
gccacggacatcccga

SEQ ID NO: 2076 - DNA, 16 bp, synthetic construct
  misc_feature 1..16: note = Description of Artificial Sequence: Syntheticoligonucleotide
  source 1..16: mol_type = other DNA
cttagcagggtccctc

SEQ ID NO: 2077 - DNA, 16 bp, synthetic construct
  misc_feature 1..16: note = Description of Artificial Sequence: Syntheticoligonucleotide
  source 1..16: mol_type = other DNA
agctcgggcgaatcca

SEQ ID NO: 2078 - DNA, 16 bp, synthetic construct
  misc_feature 1..16: note = Description of Artificial Sequence: Syntheticoligonucleotide
  source 1..16: mol_type = other DNA
cggagtaacttgcaca

SEQ ID NO: 2079 - DNA, 16 bp, synthetic construct
  misc_feature 1..16: note = Description of Artificial Sequence: Syntheticoligonucleotide
  source 1..16: mol_type = other DNA
acaggtactgtttgct

SEQ ID NO: 2080 - DNA, 16 bp, synthetic construct
  misc_feature 1..16: note = Description of Artificial Sequence: Syntheticoligonucleotide
  source 1..16: mol_type = other DNA
tagctagctccctgtc

SEQ ID NO: 2081 - DNA, 16 bp, synthetic construct
  misc_feature 1..16: note = Description of Artificial Sequence: Syntheticoligonucleotide
  source 1..16: mol_type = other DNA
ttgggaggcaggtccc

SEQ ID NO: 2082 - DNA, 16 bp, synthetic construct
  misc_feature 1..16: note = Description of Artificial Sequence: Syntheticoligonucleotide
  source 1..16: mol_type = other DNA
tgaggtggacatctgg

SEQ ID NO: 2083 - DNA, 16 bp, synthetic construct
  misc_feature 1..16: note = Description of Artificial Sequence: Syntheticoligonucleotide
  source 1..16: mol_type = other DNA
gttgggttggcataaa

SEQ ID NO: 2084 - DNA, 16 bp, synthetic construct
  misc_feature 1..16: note = Description of Artificial Sequence: Syntheticoligonucleotide
  source 1..16: mol_type = other DNA
tctggtatcatgtagg

SEQ ID NO: 2085 - DNA, 16 bp, synthetic construct
  misc_feature 1..16: note = Description of Artificial Sequence: Syntheticoligonucleotide
  source 1..16: mol_type = other DNA
caaggatgaggttagt

SEQ ID NO: 2086 - DNA, 16 bp, synthetic construct
  misc_feature 1..16: note = Description of Artificial Sequence: Syntheticoligonucleotide
  source 1..16: mol_type = other DNA
gacatttcagggttgg

SEQ ID NO: 2087 - DNA, 16 bp, synthetic construct
  misc_feature 1..16: note = Description of Artificial Sequence: Syntheticoligonucleotide
  source 1..16: mol_type = other DNA
aatcagggacaggact

SEQ ID NO: 2088 - DNA, 16 bp, synthetic construct
  misc_feature 1..16: note = Description of Artificial Sequence: Syntheticoligonucleotide
  source 1..16: mol_type = other DNA
ttgcttttataccgag

SEQ ID NO: 2089 - DNA, 16 bp, synthetic construct
  misc_feature 1..16: note = Description of Artificial Sequence: Syntheticoligonucleotide
  source 1..16: mol_type = other DNA
gctgggcgaggctcct

SEQ ID NO: 2090 - DNA, 16 bp, synthetic construct
  misc_feature 1..16: note = Description of Artificial Sequence: Syntheticoligonucleotide
  source 1..16: mol_type = other DNA
gaggaggcatgggccc

SEQ ID NO: 2091 - DNA, 16 bp, synthetic construct
  misc_feature 1..16: note = Description of Artificial Sequence: Syntheticoligonucleotide
  source 1..16: mol_type = other DNA
atccaccgttgagagc

SEQ ID NO: 2092 - DNA, 16 bp, synthetic construct
  misc_feature 1..16: note = Description of Artificial Sequence: Syntheticoligonucleotide
  source 1..16: mol_type = other DNA
aaagggtgctgtcctt

SEQ ID NO: 2093 - DNA, 16 bp, synthetic construct
  misc_feature 1..16: note = Description of Artificial Sequence: Syntheticoligonucleotide
  source 1..16: mol_type = other DNA
tccgcctggcagtgct

SEQ ID NO: 2094 - DNA, 16 bp, synthetic construct
  misc_feature 1..16: note = Description of Artificial Sequence: Syntheticoligonucleotide
  source 1..16: mol_type = other DNA
caggagcccttgtcgg

SEQ ID NO: 2095 - DNA, 16 bp, synthetic construct
  misc_feature 1..16: note = Description of Artificial Sequence: Syntheticoligonucleotide
  source 1..16: mol_type = other DNA
aagtagtccatgttgt

SEQ ID NO: 2096 - DNA, 16 bp, synthetic construct
  misc_feature 1..16: note = Description of Artificial Sequence: Syntheticoligonucleotide
  source 1..16: mol_type = other DNA
cagcccccttctcgct

SEQ ID NO: 2097 - DNA, 16 bp, synthetic construct
  misc_feature 1..16: note = Description of Artificial Sequence: Syntheticoligonucleotide
  source 1..16: mol_type = other DNA
gcctatcatccctgcc

SEQ ID NO: 2098 - DNA, 16 bp, synthetic construct
  misc_feature 1..16: note = Description of Artificial Sequence: Syntheticoligonucleotide
  source 1..16: mol_type = other DNA
aagtaatctgtgcgag

SEQ ID NO: 2099 - DNA, 16 bp, synthetic construct
  misc_feature 1..16: note = Description of Artificial Sequence: Syntheticoligonucleotide
  source 1..16: mol_type = other DNA
atgatgcagctttgag

SEQ ID NO: 2100 - DNA, 16 bp, synthetic construct
  misc_feature 1..16: note = Description of Artificial Sequence: Syntheticoligonucleotide
  source 1..16: mol_type = other DNA
gtgagatacacaggtg

SEQ ID NO: 2101 - DNA, 16 bp, synthetic construct
  misc_feature 1..16: note = Description of Artificial Sequence: Syntheticoligonucleotide
  source 1..16: mol_type = other DNA
acggtactgtgggttg

SEQ ID NO: 2102 - DNA, 16 bp, synthetic construct
  misc_feature 1..16: note = Description of Artificial Sequence: Syntheticoligonucleotide
  source 1..16: mol_type = other DNA
gccacctcagaggagc

SEQ ID NO: 2103 - DNA, 16 bp, synthetic construct
  misc_feature 1..16: note = Description of Artificial Sequence: Syntheticoligonucleotide
  source 1..16: mol_type = other DNA
caacccacatcccgtt

SEQ ID NO: 2104 - DNA, 16 bp, synthetic construct
  misc_feature 1..16: note = Description of Artificial Sequence: Syntheticoligonucleotide
  source 1..16: mol_type = other DNA
atcacggtagctgggt

SEQ ID NO: 2105 - DNA, 16 bp, synthetic construct
  misc_feature 1..16: note = Description of Artificial Sequence: Syntheticoligonucleotide
  source 1..16: mol_type = other DNA
aatcctatccatctac

SEQ ID NO: 2106 - DNA, 16 bp, synthetic construct
  misc_feature 1..16: note = Description of Artificial Sequence: Syntheticoligonucleotide
  source 1..16: mol_type = other DNA
agagagtctgagtgta

SEQ ID NO: 2107 - DNA, 16 bp, synthetic construct
  misc_feature 1..16: note = Description of Artificial Sequence: Syntheticoligonucleotide
  source 1..16: mol_type = other DNA
cgacattactattatt

SEQ ID NO: 2108 - DNA, 16 bp, synthetic construct
  misc_feature 1..16: note = Description of Artificial Sequence: Syntheticoligonucleotide
  source 1..16: mol_type = other DNA
tcagttaagtgctcag

SEQ ID NO: 2109 - DNA, 16 bp, synthetic construct
  misc_feature 1..16: note = Description of Artificial Sequence: Syntheticoligonucleotide
  source 1..16: mol_type = other DNA
gactctggtcacacac

SEQ ID NO: 2110 - DNA, 16 bp, synthetic construct
  misc_feature 1..16: note = Description of Artificial Sequence: Syntheticoligonucleotide
  source 1..16: mol_type = other DNA
caaagttcatgctgat

SEQ ID NO: 2111 - DNA, 16 bp, synthetic construct
  misc_feature 1..16: note = Description of Artificial Sequence: Syntheticoligonucleotide
  source 1..16: mol_type = other DNA
gggtcataaactttaa

SEQ ID NO: 2112 - DNA, 16 bp, synthetic construct
  misc_feature 1..16: note = Description of Artificial Sequence: Syntheticoligonucleotide
  source 1..16: mol_type = other DNA
aagcatgaatggccaa

SEQ ID NO: 2113 - DNA, 16 bp, synthetic construct
  misc_feature 1..16: note = Description of Artificial Sequence: Syntheticoligonucleotide
  source 1..16: mol_type = other DNA
aggttaataaccattc

SEQ ID NO: 2114 - DNA, 16 bp, synthetic construct
  misc_feature 1..16: note = Description of Artificial Sequence: Syntheticoligonucleotide
  source 1..16: mol_type = other DNA
agaagccaacataggt

SEQ ID NO: 2115 - DNA, 16 bp, synthetic construct
  misc_feature 1..16: note = Description of Artificial Sequence: Syntheticoligonucleotide
  source 1..16: mol_type = other DNA
ttataaccattgcagt

SEQ ID NO: 2116 - DNA, 16 bp, synthetic construct
  misc_feature 1..16: note = Description of Artificial Sequence: Syntheticoligonucleotide
  source 1..16: mol_type = other DNA
cagtttgaaatgtcac

SEQ ID NO: 2117 - DNA, 16 bp, synthetic construct
  misc_feature 1..16: note = Description of Artificial Sequence: Syntheticoligonucleotide
  source 1..16: mol_type = other DNA
gtggcatttcaaactg

SEQ ID NO: 2118 - DNA, 16 bp, synthetic construct
  misc_feature 1..16: note = Description of Artificial Sequence: Syntheticoligonucleotide
  source 1..16: mol_type = other DNA
aacatttgctggtctc

SEQ ID NO: 2119 - DNA, 16 bp, synthetic construct
  misc_feature 1..16: note = Description of Artificial Sequence: Syntheticoligonucleotide
  source 1..16: mol_type = other DNA
ctggctgagagatagg

SEQ ID NO: 2120 - DNA, 16 bp, synthetic construct
  misc_feature 1..16: note = Description of Artificial Sequence: Syntheticoligonucleotide
  source 1..16: mol_type = other DNA
atttcggtgaggccct

SEQ ID NO: 2121 - DNA, 16 bp, synthetic construct
  misc_feature 1..16: note = Description of Artificial Sequence: Syntheticoligonucleotide
  source 1..16: mol_type = other DNA
aactaggcctcctgac

SEQ ID NO: 2122 - DNA, 16 bp, synthetic construct
  misc_feature 1..16: note = Description of Artificial Sequence: Syntheticoligonucleotide
  source 1..16: mol_type = other DNA
tccgccagagatggca

SEQ ID NO: 2123 - DNA, 16 bp, synthetic construct
  misc_feature 1..16: note = Description of Artificial Sequence: Syntheticoligonucleotide
  source 1..16: mol_type = other DNA
ctagaatctcaaaacc

SEQ ID NO: 2124 - DNA, 16 bp, synthetic construct
  misc_feature 1..16: note = Description of Artificial Sequence: Syntheticoligonucleotide
  source 1..16: mol_type = other DNA
aggacccaggtttgaa

SEQ ID NO: 2125 - DNA, 16 bp, synthetic construct
  misc_feature 1..16: note = Description of Artificial Sequence: Syntheticoligonucleotide
  source 1..16: mol_type = other DNA
caccacggaggaagag

SEQ ID NO: 2126 - DNA, 16 bp, synthetic construct
  misc_feature 1..16: note = Description of Artificial Sequence: Syntheticoligonucleotide
  source 1..16: mol_type = other DNA
gccctgttgtcacagc

SEQ ID NO: 2127 - DNA, 16 bp, synthetic construct
  misc_feature 1..16: note = Description of Artificial Sequence: Syntheticoligonucleotide
  source 1..16: mol_type = other DNA
catgtgggatggcctg

SEQ ID NO: 2128 - DNA, 16 bp, synthetic construct
  misc_feature 1..16: note = Description of Artificial Sequence: Syntheticoligonucleotide
  source 1..16: mol_type = other DNA
acaaactaataccgat

SEQ ID NO: 2129 - DNA, 16 bp, synthetic construct
  misc_feature 1..16: note = Description of Artificial Sequence: Syntheticoligonucleotide
  source 1..16: mol_type = other DNA
gaatccaggtattaag

SEQ ID NO: 2130 - DNA, 16 bp, synthetic construct
  misc_feature 1..16: note = Description of Artificial Sequence: Syntheticoligonucleotide
  source 1..16: mol_type = other DNA
tcccatagtgacttga

SEQ ID NO: 2131 - DNA, 16 bp, synthetic construct
  misc_feature 1..16: note = Description of Artificial Sequence: Syntheticoligonucleotide
  source 1..16: mol_type = other DNA
ctattgtcctcacctt

SEQ ID NO: 2132 - DNA, 16 bp, synthetic construct
  misc_feature 1..16: note = Description of Artificial Sequence: Syntheticoligonucleotide
  source 1..16: mol_type = other DNA
tgtgatcatgcacgga

SEQ ID NO: 2133 - DNA, 16 bp, synthetic construct
  misc_feature 1..16: note = Description of Artificial Sequence: Syntheticoligonucleotide
  source 1..16: mol_type = other DNA
acattacctgagatgg

SEQ ID NO: 2134 - DNA, 16 bp, synthetic construct
  misc_feature 1..16: note = Description of Artificial Sequence: Syntheticoligonucleotide
  source 1..16: mol_type = other DNA
taatctgaagctggat

SEQ ID NO: 2135 - DNA, 16 bp, synthetic construct
  misc_feature 1..16: note = Description of Artificial Sequence: Syntheticoligonucleotide
  source 1..16: mol_type = other DNA
ccccagtgactaggca

SEQ ID NO: 2136 - DNA, 16 bp, synthetic construct
  misc_feature 1..16: note = Description of Artificial Sequence: Syntheticoligonucleotide
  source 1..16: mol_type = other DNA
atgtgtcctctatgag

SEQ ID NO: 2137 - DNA, 16 bp, synthetic construct
  misc_feature 1..16: note = Description of Artificial Sequence: Syntheticoligonucleotide
  source 1..16: mol_type = other DNA
ggcggtatgagatact

SEQ ID NO: 2138 - DNA, 16 bp, synthetic construct
  misc_feature 1..16: note = Description of Artificial Sequence: Syntheticoligonucleotide
  source 1..16: mol_type = other DNA
gccctgcaacatctgc

SEQ ID NO: 2139 - DNA, 16 bp, synthetic construct
  misc_feature 1..16: note = Description of Artificial Sequence: Syntheticoligonucleotide
  source 1..16: mol_type = other DNA
gtagatgctatgatca

SEQ ID NO: 2140 - DNA, 16 bp, synthetic construct
  misc_feature 1..16: note = Description of Artificial Sequence: Syntheticoligonucleotide
  source 1..16: mol_type = other DNA
cccattcaccgtccat

SEQ ID NO: 2141 - DNA, 16 bp, synthetic construct
  misc_feature 1..16: note = Description of Artificial Sequence: Syntheticoligonucleotide
  source 1..16: mol_type = other DNA
ctgagacctgacacct

SEQ ID NO: 2142 - DNA, 16 bp, synthetic construct
  misc_feature 1..16: note = Description of Artificial Sequence: Syntheticoligonucleotide
  source 1..16: mol_type = other DNA
cggccattcgcaggtg

SEQ ID NO: 2143 - DNA, 16 bp, synthetic construct
  misc_feature 1..16: note = Description of Artificial Sequence: Syntheticoligonucleotide
  source 1..16: mol_type = other DNA
ccactcacttgaggaa

SEQ ID NO: 2144 - DNA, 16 bp, synthetic construct
  misc_feature 1..16: note = Description of Artificial Sequence: Syntheticoligonucleotide
  source 1..16: mol_type = other DNA
attttgatcaagacac

SEQ ID NO: 2145 - DNA, 16 bp, synthetic construct
  misc_feature 1..16: note = Description of Artificial Sequence: Syntheticoligonucleotide
  source 1..16: mol_type = other DNA
tagaggagctagaact

SEQ ID NO: 2146 - DNA, 16 bp, synthetic construct
  misc_feature 1..16: note = Description of Artificial Sequence: Syntheticoligonucleotide
  source 1..16: mol_type = other DNA
gattccatgcaggtga

SEQ ID NO: 2147 - DNA, 16 bp, synthetic construct
  misc_feature 1..16: note = Description of Artificial Sequence: Syntheticoligonucleotide
  source 1..16: mol_type = other DNA
gcacatggtggacaga

SEQ ID NO: 2148 - DNA, 16 bp, synthetic construct
  misc_feature 1..16: note = Description of Artificial Sequence: Syntheticoligonucleotide
  source 1..16: mol_type = other DNA
tgtgaggttaggttcc

SEQ ID NO: 2149 - DNA, 16 bp, synthetic construct
  misc_feature 1..16: note = Description of Artificial Sequence: Syntheticoligonucleotide
  source 1..16: mol_type = other DNA
cgccatcttgaaatct

SEQ ID NO: 2150 - DNA, 16 bp, synthetic construct
  misc_feature 1..16: note = Description of Artificial Sequence: Syntheticoligonucleotide
  source 1..16: mol_type = other DNA
attagagcacaggtgc

SEQ ID NO: 2151 - DNA, 16 bp, synthetic construct
  misc_feature 1..16: note = Description of Artificial Sequence: Syntheticoligonucleotide
  source 1..16: mol_type = other DNA
gtgcaaggaccattct

SEQ ID NO: 2152 - DNA, 16 bp, synthetic construct
  misc_feature 1..16: note = Description of Artificial Sequence: Syntheticoligonucleotide
  source 1..16: mol_type = other DNA
actcgagaccatatgg

SEQ ID NO: 2153 - DNA, 16 bp, synthetic construct
  misc_feature 1..16: note = Description of Artificial Sequence: Syntheticoligonucleotide
  source 1..16: mol_type = other DNA
acttagcagggtccct

SEQ ID NO: 2154 - DNA, 16 bp, synthetic construct
  misc_feature 1..16: note = Description of Artificial Sequence: Syntheticoligonucleotide
  source 1..16: mol_type = other DNA
gagctcgggcgaatcc

SEQ ID NO: 2155 - DNA, 16 bp, synthetic construct
  misc_feature 1..16: note = Description of Artificial Sequence: Syntheticoligonucleotide
  source 1..16: mol_type = other DNA
gcggagtaacttgcac

SEQ ID NO: 2156 - DNA, 16 bp, synthetic construct
  misc_feature 1..16: note = Description of Artificial Sequence: Syntheticoligonucleotide
  source 1..16: mol_type = other DNA
cacaggtactgtttgc

SEQ ID NO: 2157 - DNA, 16 bp, synthetic construct
  misc_feature 1..16: note = Description of Artificial Sequence: Syntheticoligonucleotide
  source 1..16: mol_type = other DNA
ctagctagctccctgt

SEQ ID NO: 2158 - DNA, 16 bp, synthetic construct
  misc_feature 1..16: note = Description of Artificial Sequence: Syntheticoligonucleotide
  source 1..16: mol_type = other DNA
gaacccactctgaggg

SEQ ID NO: 2159 - DNA, 16 bp, synthetic construct
  misc_feature 1..16: note = Description of Artificial Sequence: Syntheticoligonucleotide
  source 1..16: mol_type = other DNA
ctgaggtggacatctg

SEQ ID NO: 2160 - DNA, 16 bp, synthetic construct
  misc_feature 1..16: note = Description of Artificial Sequence: Syntheticoligonucleotide
  source 1..16: mol_type = other DNA
tgtattgacatactgg

SEQ ID NO: 2161 - DNA, 16 bp, synthetic construct
  misc_feature 1..16: note = Description of Artificial Sequence: Syntheticoligonucleotide
  source 1..16: mol_type = other DNA
gaatatctggtatcat

SEQ ID NO: 2162 - DNA, 16 bp, synthetic construct
  misc_feature 1..16: note = Description of Artificial Sequence: Syntheticoligonucleotide
  source 1..16: mol_type = other DNA
gcaaggatgaggttag

SEQ ID NO: 2163 - DNA, 16 bp, synthetic construct
  misc_feature 1..16: note = Description of Artificial Sequence: Syntheticoligonucleotide
  source 1..16: mol_type = other DNA
gtctgggatggagttg

SEQ ID NO: 2164 - DNA, 16 bp, synthetic construct
  misc_feature 1..16: note = Description of Artificial Sequence: Syntheticoligonucleotide
  source 1..16: mol_type = other DNA
taatcagggacaggac

SEQ ID NO: 2165 - DNA, 16 bp, synthetic construct
  misc_feature 1..16: note = Description of Artificial Sequence: Syntheticoligonucleotide
  source 1..16: mol_type = other DNA
tttgcttttataccga

SEQ ID NO: 2166 - DNA, 16 bp, synthetic construct
  misc_feature 1..16: note = Description of Artificial Sequence: Syntheticoligonucleotide
  source 1..16: mol_type = other DNA
agctgggcgaggctcc

SEQ ID NO: 2167 - DNA, 16 bp, synthetic construct
  misc_feature 1..16: note = Description of Artificial Sequence: Syntheticoligonucleotide
  source 1..16: mol_type = other DNA
agaggaggcatgggcc

SEQ ID NO: 2168 - DNA, 16 bp, synthetic construct
  misc_feature 1..16: note = Description of Artificial Sequence: Syntheticoligonucleotide
  source 1..16: mol_type = other DNA
gcatccaccgttgaga

SEQ ID NO: 2169 - DNA, 16 bp, synthetic construct
  misc_feature 1..16: note = Description of Artificial Sequence: Syntheticoligonucleotide
  source 1..16: mol_type = other DNA
gaaagggtgctgtcct

SEQ ID NO: 2170 - DNA, 16 bp, synthetic construct
  misc_feature 1..16: note = Description of Artificial Sequence: Syntheticoligonucleotide
  source 1..16: mol_type = other DNA
aagatggtccgcctgg

SEQ ID NO: 2171 - DNA, 16 bp, synthetic construct
  misc_feature 1..16: note = Description of Artificial Sequence: Syntheticoligonucleotide
  source 1..16: mol_type = other DNA
agcaggagcccttgtc

SEQ ID NO: 2172 - DNA, 16 bp, synthetic construct
  misc_feature 1..16: note = Description of Artificial Sequence: Syntheticoligonucleotide
  source 1..16: mol_type = other DNA
gaagtagtccatgttg

SEQ ID NO: 2173 - DNA, 16 bp, synthetic construct
  misc_feature 1..16: note = Description of Artificial Sequence: Syntheticoligonucleotide
  source 1..16: mol_type = other DNA
cggtccacacagcccc

SEQ ID NO: 2174 - DNA, 16 bp, synthetic construct
  misc_feature 1..16: note = Description of Artificial Sequence: Syntheticoligonucleotide
  source 1..16: mol_type = other DNA
gggcctatcatccctg

SEQ ID NO: 2175 - DNA, 16 bp, synthetic construct
  misc_feature 1..16: note = Description of Artificial Sequence: Syntheticoligonucleotide
  source 1..16: mol_type = other DNA
tgaagtaatctgtgcg

SEQ ID NO: 2176 - DNA, 16 bp, synthetic construct
  misc_feature 1..16: note = Description of Artificial Sequence: Syntheticoligonucleotide
  source 1..16: mol_type = other DNA
tgatgatgcagctttg

SEQ ID NO: 2177 - DNA, 16 bp, synthetic construct
  misc_feature 1..16: note = Description of Artificial Sequence: Syntheticoligonucleotide
  source 1..16: mol_type = other DNA
cgtgagatacacaggt

SEQ ID NO: 2178 - DNA, 16 bp, synthetic construct
  misc_feature 1..16: note = Description of Artificial Sequence: Syntheticoligonucleotide
  source 1..16: mol_type = other DNA
gacggtactgtgggtt

SEQ ID NO: 2179 - DNA, 16 bp, synthetic construct
  misc_feature 1..16: note = Description of Artificial Sequence: Syntheticoligonucleotide
  source 1..16: mol_type = other DNA
accgccacctcagagg

SEQ ID NO: 2180 - DNA, 16 bp, synthetic construct
  misc_feature 1..16: note = Description of Artificial Sequence: Syntheticoligonucleotide
  source 1..16: mol_type = other DNA
acaacccacatcccgt

SEQ ID NO: 2181 - DNA, 16 bp, synthetic construct
  misc_feature 1..16: note = Description of Artificial Sequence: Syntheticoligonucleotide
  source 1..16: mol_type = other DNA
aatcacggtagctggg

SEQ ID NO: 2182 - DNA, 16 bp, synthetic construct
  misc_feature 1..16: note = Description of Artificial Sequence: Syntheticoligonucleotide
  source 1..16: mol_type = other DNA
ctggcagctgacatat

SEQ ID NO: 2183 - DNA, 16 bp, synthetic construct
  misc_feature 1..16: note = Description of Artificial Sequence: Syntheticoligonucleotide
  source 1..16: mol_type = other DNA
aagagagtctgagtgt

SEQ ID NO: 2184 - DNA, 16 bp, synthetic construct
  misc_feature 1..16: note = Description of Artificial Sequence: Syntheticoligonucleotide
  source 1..16: mol_type = other DNA
cggcgacattactatt

SEQ ID NO: 2185 - DNA, 16 bp, synthetic construct
  misc_feature 1..16: note = Description of Artificial Sequence: Syntheticoligonucleotide
  source 1..16: mol_type = other DNA
ttcagttaagtgctca

SEQ ID NO: 2186 - DNA, 16 bp, synthetic construct
  misc_feature 1..16: note = Description of Artificial Sequence: Syntheticoligonucleotide
  source 1..16: mol_type = other DNA
atggactctggtcaca

SEQ ID NO: 2187 - DNA, 16 bp, synthetic construct
  misc_feature 1..16: note = Description of Artificial Sequence: Syntheticoligonucleotide
  source 1..16: mol_type = other DNA
tcaaagttcatgctga

SEQ ID NO: 2188 - DNA, 16 bp, synthetic construct
  misc_feature 1..16: note = Description of Artificial Sequence: Syntheticoligonucleotide
  source 1..16: mol_type = other DNA
agagggtcataaactt

SEQ ID NO: 2189 - DNA, 16 bp, synthetic construct
  misc_feature 1..16: note = Description of Artificial Sequence: Syntheticoligonucleotide
  source 1..16: mol_type = other DNA
gaccagacaaccaaaa

SEQ ID NO: 2190 - DNA, 16 bp, synthetic construct
  misc_feature 1..16: note = Description of Artificial Sequence: Syntheticoligonucleotide
  source 1..16: mol_type = other DNA
tgaaaggttaataacc

SEQ ID NO: 2191 - DNA, 16 bp, synthetic construct
  misc_feature 1..16: note = Description of Artificial Sequence: Syntheticoligonucleotide
  source 1..16: mol_type = other DNA
tagaagccaacatagg

SEQ ID NO: 2192 - DNA, 16 bp, synthetic construct
  misc_feature 1..16: note = Description of Artificial Sequence: Syntheticoligonucleotide
  source 1..16: mol_type = other DNA
attataaccattgcag

SEQ ID NO: 2193 - DNA, 16 bp, synthetic construct
  misc_feature 1..16: note = Description of Artificial Sequence: Syntheticoligonucleotide
  source 1..16: mol_type = other DNA
cccagtttgaaatgtc

SEQ ID NO: 2194 - DNA, 16 bp, synthetic construct
  misc_feature 1..16: note = Description of Artificial Sequence: Syntheticoligonucleotide
  source 1..16: mol_type = other DNA
ttgtgatgaatgtggc

SEQ ID NO: 2195 - DNA, 16 bp, synthetic construct
  misc_feature 1..16: note = Description of Artificial Sequence: Syntheticoligonucleotide
  source 1..16: mol_type = other DNA
gaacatttgctggtct

SEQ ID NO: 2196 - DNA, 16 bp, synthetic construct
  misc_feature 1..16: note = Description of Artificial Sequence: Syntheticoligonucleotide
  source 1..16: mol_type = other DNA
ggactggctgagagat

SEQ ID NO: 2197 - DNA, 16 bp, synthetic construct
  misc_feature 1..16: note = Description of Artificial Sequence: Syntheticoligonucleotide
  source 1..16: mol_type = other DNA
catttcggtgaggccc

SEQ ID NO: 2198 - DNA, 16 bp, synthetic construct
  misc_feature 1..16: note = Description of Artificial Sequence: Syntheticoligonucleotide
  source 1..16: mol_type = other DNA
caactaggcctcctga

SEQ ID NO: 2199 - DNA, 16 bp, synthetic construct
  misc_feature 1..16: note = Description of Artificial Sequence: Syntheticoligonucleotide
  source 1..16: mol_type = other DNA
ctccgccagagatggc

SEQ ID NO: 2200 - DNA, 16 bp, synthetic construct
  misc_feature 1..16: note = Description of Artificial Sequence: Syntheticoligonucleotide
  source 1..16: mol_type = other DNA
gatcctagaatctcaa

SEQ ID NO: 2201 - DNA, 16 bp, synthetic construct
  misc_feature 1..16: note = Description of Artificial Sequence: Syntheticoligonucleotide
  source 1..16: mol_type = other DNA
gaggacccaggtttga

SEQ ID NO: 2202 - DNA, 16 bp, synthetic construct
  misc_feature 1..16: note = Description of Artificial Sequence: Syntheticoligonucleotide
  source 1..16: mol_type = other DNA
gacaccacggaggaag

SEQ ID NO: 2203 - DNA, 16 bp, synthetic construct
  misc_feature 1..16: note = Description of Artificial Sequence: Syntheticoligonucleotide
  source 1..16: mol_type = other DNA
ctgggccctgttgtca

SEQ ID NO: 2204 - DNA, 16 bp, synthetic construct
  misc_feature 1..16: note = Description of Artificial Sequence: Syntheticoligonucleotide
  source 1..16: mol_type = other DNA
acacatgtgggatggc

SEQ ID NO: 2205 - DNA, 16 bp, synthetic construct
  misc_feature 1..16: note = Description of Artificial Sequence: Syntheticoligonucleotide
  source 1..16: mol_type = other DNA
actcagttgtggtact

SEQ ID NO: 2206 - DNA, 16 bp, synthetic construct
  misc_feature 1..16: note = Description of Artificial Sequence: Syntheticoligonucleotide
  source 1..16: mol_type = other DNA
gagaatccaggtatta

SEQ ID NO: 2207 - DNA, 16 bp, synthetic construct
  misc_feature 1..16: note = Description of Artificial Sequence: Syntheticoligonucleotide
  source 1..16: mol_type = other DNA
gtcccatagtgacttg

SEQ ID NO: 2208 - DNA, 16 bp, synthetic construct
  misc_feature 1..16: note = Description of Artificial Sequence: Syntheticoligonucleotide
  source 1..16: mol_type = other DNA
tctattgtcctcacct

SEQ ID NO: 2209 - DNA, 16 bp, synthetic construct
  misc_feature 1..16: note = Description of Artificial Sequence: Syntheticoligonucleotide
  source 1..16: mol_type = other DNA
gtgtgatcatgcacgg

SEQ ID NO: 2210 - DNA, 16 bp, synthetic construct
  misc_feature 1..16: note = Description of Artificial Sequence: Syntheticoligonucleotide
  source 1..16: mol_type = other DNA
gacattacctgagatg

SEQ ID NO: 2211 - DNA, 16 bp, synthetic construct
  misc_feature 1..16: note = Description of Artificial Sequence: Syntheticoligonucleotide
  source 1..16: mol_type = other DNA
acttaatctgaagctg

SEQ ID NO: 2212 - DNA, 16 bp, synthetic construct
  misc_feature 1..16: note = Description of Artificial Sequence: Syntheticoligonucleotide
  source 1..16: mol_type = other DNA
ttgccccagtgactag

SEQ ID NO: 2213 - DNA, 16 bp, synthetic construct
  misc_feature 1..16: note = Description of Artificial Sequence: Syntheticoligonucleotide
  source 1..16: mol_type = other DNA
ccctggtgtggatgtg

SEQ ID NO: 2214 - DNA, 16 bp, synthetic construct
  misc_feature 1..16: note = Description of Artificial Sequence: Syntheticoligonucleotide
  source 1..16: mol_type = other DNA
gggcggtatgagatac

SEQ ID NO: 2215 - DNA, 16 bp, synthetic construct
  misc_feature 1..16: note = Description of Artificial Sequence: Syntheticoligonucleotide
  source 1..16: mol_type = other DNA
attttcttggccctgc

SEQ ID NO: 2216 - DNA, 16 bp, synthetic construct
  misc_feature 1..16: note = Description of Artificial Sequence: Syntheticoligonucleotide
  source 1..16: mol_type = other DNA
tggtagatgctatgat

SEQ ID NO: 2217 - DNA, 16 bp, synthetic construct
  misc_feature 1..16: note = Description of Artificial Sequence: Syntheticoligonucleotide
  source 1..16: mol_type = other DNA
catgtgggctgtggtt

SEQ ID NO: 2218 - DNA, 16 bp, synthetic construct
  misc_feature 1..16: note = Description of Artificial Sequence: Syntheticoligonucleotide
  source 1..16: mol_type = other DNA
gcctctgagacctgac

SEQ ID NO: 2219 - DNA, 16 bp, synthetic construct
  misc_feature 1..16: note = Description of Artificial Sequence: Syntheticoligonucleotide
  source 1..16: mol_type = other DNA
acggccattcgcaggt

SEQ ID NO: 2220 - DNA, 16 bp, synthetic construct
  misc_feature 1..16: note = Description of Artificial Sequence: Syntheticoligonucleotide
  source 1..16: mol_type = other DNA
gccactcacttgagga

SEQ ID NO: 2221 - DNA, 16 bp, synthetic construct
  misc_feature 1..16: note = Description of Artificial Sequence: Syntheticoligonucleotide
  source 1..16: mol_type = other DNA
gattttgatcaagaca

SEQ ID NO: 2222 - DNA, 16 bp, synthetic construct
  misc_feature 1..16: note = Description of Artificial Sequence: Syntheticoligonucleotide
  source 1..16: mol_type = other DNA
ctagaggagctagaac

SEQ ID NO: 2223 - DNA, 16 bp, synthetic construct
  misc_feature 1..16: note = Description of Artificial Sequence: Syntheticoligonucleotide
  source 1..16: mol_type = other DNA
agattccatgcaggtg

SEQ ID NO: 2224 - DNA, 16 bp, synthetic construct
  misc_feature 1..16: note = Description of Artificial Sequence: Syntheticoligonucleotide
  source 1..16: mol_type = other DNA
gaacttggtttctggc

SEQ ID NO: 2225 - DNA, 16 bp, synthetic construct
  misc_feature 1..16: note = Description of Artificial Sequence: Syntheticoligonucleotide
  source 1..16: mol_type = other DNA
atgtgaggttaggttc

SEQ ID NO: 2226 - DNA, 16 bp, synthetic construct
  misc_feature 1..16: note = Description of Artificial Sequence: Syntheticoligonucleotide
  source 1..16: mol_type = other DNA
gtggtcgccatcttga

SEQ ID NO: 2227 - DNA, 16 bp, synthetic construct
  misc_feature 1..16: note = Description of Artificial Sequence: Syntheticoligonucleotide
  source 1..16: mol_type = other DNA
tattagagcacaggtg

SEQ ID NO: 2228 - DNA, 16 bp, synthetic construct
  misc_feature 1..16: note = Description of Artificial Sequence: Syntheticoligonucleotide
  source 1..16: mol_type = other DNA
agtgcaaggaccattc

SEQ ID NO: 2229 - DNA, 16 bp, synthetic construct
  misc_feature 1..16: note = Description of Artificial Sequence: Syntheticoligonucleotide
  source 1..16: mol_type = other DNA
cactcgagaccatatg

SEQ ID NO: 2230 - DNA, 16 bp, synthetic construct
  misc_feature 1..16: note = Description of Artificial Sequence: Syntheticoligonucleotide
  source 1..16: mol_type = other DNA
ttacttagcagggtcc

SEQ ID NO: 2231 - DNA, 16 bp, synthetic construct
  misc_feature 1..16: note = Description of Artificial Sequence: Syntheticoligonucleotide
  source 1..16: mol_type = other DNA
tgagctcgggcgaatc

SEQ ID NO: 2232 - DNA, 16 bp, synthetic construct
  misc_feature 1..16: note = Description of Artificial Sequence: Syntheticoligonucleotide
  source 1..16: mol_type = other DNA
agcggagtaacttgca

SEQ ID NO: 2233 - DNA, 16 bp, synthetic construct
  misc_feature 1..16: note = Description of Artificial Sequence: Syntheticoligonucleotide
  source 1..16: mol_type = other DNA
gcacaggtactgtttg

SEQ ID NO: 2234 - DNA, 16 bp, synthetic construct
  misc_feature 1..16: note = Description of Artificial Sequence: Syntheticoligonucleotide
  source 1..16: mol_type = other DNA
cctagctagctccctg

SEQ ID NO: 2235 - DNA, 16 bp, synthetic construct
  misc_feature 1..16: note = Description of Artificial Sequence: Syntheticoligonucleotide
  source 1..16: mol_type = other DNA
ggaacccactctgagg

SEQ ID NO: 2236 - DNA, 16 bp, synthetic construct
  misc_feature 1..16: note = Description of Artificial Sequence: Syntheticoligonucleotide
  source 1..16: mol_type = other DNA
gctgaggtggacatct

SEQ ID NO: 2237 - DNA, 16 bp, synthetic construct
  misc_feature 1..16: note = Description of Artificial Sequence: Syntheticoligonucleotide
  source 1..16: mol_type = other DNA
ggtgtattgacatact

SEQ ID NO: 2238 - DNA, 16 bp, synthetic construct
  misc_feature 1..16: note = Description of Artificial Sequence: Syntheticoligonucleotide
  source 1..16: mol_type = other DNA
tcagggtttcagttca

SEQ ID NO: 2239 - DNA, 16 bp, synthetic construct
  misc_feature 1..16: note = Description of Artificial Sequence: Syntheticoligonucleotide
  source 1..16: mol_type = other DNA
ggcaaggatgaggtta

SEQ ID NO: 2240 - DNA, 16 bp, synthetic construct
  misc_feature 1..16: note = Description of Artificial Sequence: Syntheticoligonucleotide
  source 1..16: mol_type = other DNA
tgaaaggtctgggatg

SEQ ID NO: 2241 - DNA, 16 bp, synthetic construct
  misc_feature 1..16: note = Description of Artificial Sequence: Syntheticoligonucleotide
  source 1..16: mol_type = other DNA
aggtaatcagggacag

SEQ ID NO: 2242 - DNA, 16 bp, synthetic construct
  misc_feature 1..16: note = Description of Artificial Sequence: Syntheticoligonucleotide
  source 1..16: mol_type = other DNA
ctttgcttttataccg

SEQ ID NO: 2243 - DNA, 16 bp, synthetic construct
  misc_feature 1..16: note = Description of Artificial Sequence: Syntheticoligonucleotide
  source 1..16: mol_type = other DNA
ccagctgggcgaggct

SEQ ID NO: 2244 - DNA, 16 bp, synthetic construct
  misc_feature 1..16: note = Description of Artificial Sequence: Syntheticoligonucleotide
  source 1..16: mol_type = other DNA
aagaggaggcatgggc

SEQ ID NO: 2245 - DNA, 16 bp, synthetic construct
  misc_feature 1..16: note = Description of Artificial Sequence: Syntheticoligonucleotide
  source 1..16: mol_type = other DNA
atggctgggctctcca

SEQ ID NO: 2246 - DNA, 16 bp, synthetic construct
  misc_feature 1..16: note = Description of Artificial Sequence: Syntheticoligonucleotide
  source 1..16: mol_type = other DNA
agccgaaagggtgctg

SEQ ID NO: 2247 - DNA, 16 bp, synthetic construct
  misc_feature 1..16: note = Description of Artificial Sequence: Syntheticoligonucleotide
  source 1..16: mol_type = other DNA
gaagatggtccgcctg

SEQ ID NO: 2248 - DNA, 16 bp, synthetic construct
  misc_feature 1..16: note = Description of Artificial Sequence: Syntheticoligonucleotide
  source 1..16: mol_type = other DNA
cagcaggagcccttgt

SEQ ID NO: 2249 - DNA, 16 bp, synthetic construct
  misc_feature 1..16: note = Description of Artificial Sequence: Syntheticoligonucleotide
  source 1..16: mol_type = other DNA
tgaagtagtccatgtt

SEQ ID NO: 2250 - DNA, 16 bp, synthetic construct
  misc_feature 1..16: note = Description of Artificial Sequence: Syntheticoligonucleotide
  source 1..16: mol_type = other DNA
cacggtccacacagcc

SEQ ID NO: 2251 - DNA, 16 bp, synthetic construct
  misc_feature 1..16: note = Description of Artificial Sequence: Syntheticoligonucleotide
  source 1..16: mol_type = other DNA
agggcctatcatccct

SEQ ID NO: 2252 - DNA, 16 bp, synthetic construct
  misc_feature 1..16: note = Description of Artificial Sequence: Syntheticoligonucleotide
  source 1..16: mol_type = other DNA
ctgaagtaatctgtgc

SEQ ID NO: 2253 - DNA, 16 bp, synthetic construct
  misc_feature 1..16: note = Description of Artificial Sequence: Syntheticoligonucleotide
  source 1..16: mol_type = other DNA
gtgatgatgcagcttt

SEQ ID NO: 2254 - DNA, 16 bp, synthetic construct
  misc_feature 1..16: note = Description of Artificial Sequence: Syntheticoligonucleotide
  source 1..16: mol_type = other DNA
actcaagagacccact

SEQ ID NO: 2255 - DNA, 16 bp, synthetic construct
  misc_feature 1..16: note = Description of Artificial Sequence: Syntheticoligonucleotide
  source 1..16: mol_type = other DNA
ggacggtactgtgggt

SEQ ID NO: 2256 - DNA, 16 bp, synthetic construct
  misc_feature 1..16: note = Description of Artificial Sequence: Syntheticoligonucleotide
  source 1..16: mol_type = other DNA
caccgccacctcagag

SEQ ID NO: 2257 - DNA, 16 bp, synthetic construct
  misc_feature 1..16: note = Description of Artificial Sequence: Syntheticoligonucleotide
  source 1..16: mol_type = other DNA
aacaacccacatcccg

SEQ ID NO: 2258 - DNA, 16 bp, synthetic construct
  misc_feature 1..16: note = Description of Artificial Sequence: Syntheticoligonucleotide
  source 1..16: mol_type = other DNA
gaatcacggtagctgg

SEQ ID NO: 2259 - DNA, 16 bp, synthetic construct
  misc_feature 1..16: note = Description of Artificial Sequence: Syntheticoligonucleotide
  source 1..16: mol_type = other DNA
agactggcagctgaca

SEQ ID NO: 2260 - DNA, 16 bp, synthetic construct
  misc_feature 1..16: note = Description of Artificial Sequence: Syntheticoligonucleotide
  source 1..16: mol_type = other DNA
ccaggagagatgcggg

SEQ ID NO: 2261 - DNA, 16 bp, synthetic construct
  misc_feature 1..16: note = Description of Artificial Sequence: Syntheticoligonucleotide
  source 1..16: mol_type = other DNA
tcggcgacattactat

SEQ ID NO: 2262 - DNA, 16 bp, synthetic construct
  misc_feature 1..16: note = Description of Artificial Sequence: Syntheticoligonucleotide
  source 1..16: mol_type = other DNA
caaagttcagttaagt

SEQ ID NO: 2263 - DNA, 16 bp, synthetic construct
  misc_feature 1..16: note = Description of Artificial Sequence: Syntheticoligonucleotide
  source 1..16: mol_type = other DNA
aatatggactctggtc

SEQ ID NO: 2264 - DNA, 16 bp, synthetic construct
  misc_feature 1..16: note = Description of Artificial Sequence: Syntheticoligonucleotide
  source 1..16: mol_type = other DNA
atcaaagttcatgctg

SEQ ID NO: 2265 - DNA, 16 bp, synthetic construct
  misc_feature 1..16: note = Description of Artificial Sequence: Syntheticoligonucleotide
  source 1..16: mol_type = other DNA
agagagggtcataaac

SEQ ID NO: 2266 - DNA, 16 bp, synthetic construct
  misc_feature 1..16: note = Description of Artificial Sequence: Syntheticoligonucleotide
  source 1..16: mol_type = other DNA
gtaaggacatgaccag

SEQ ID NO: 2267 - DNA, 16 bp, synthetic construct
  misc_feature 1..16: note = Description of Artificial Sequence: Syntheticoligonucleotide
  source 1..16: mol_type = other DNA
gctgatgaaaggttaa

SEQ ID NO: 2268 - DNA, 16 bp, synthetic construct
  misc_feature 1..16: note = Description of Artificial Sequence: Syntheticoligonucleotide
  source 1..16: mol_type = other DNA
ctagaagccaacatag

SEQ ID NO: 2269 - DNA, 16 bp, synthetic construct
  misc_feature 1..16: note = Description of Artificial Sequence: Syntheticoligonucleotide
  source 1..16: mol_type = other DNA
tattataaccattgca

SEQ ID NO: 2270 - DNA, 16 bp, synthetic construct
  misc_feature 1..16: note = Description of Artificial Sequence: Syntheticoligonucleotide
  source 1..16: mol_type = other DNA
atcccaacaacccctc

SEQ ID NO: 2271 - DNA, 16 bp, synthetic construct
  misc_feature 1..16: note = Description of Artificial Sequence: Syntheticoligonucleotide
  source 1..16: mol_type = other DNA
acatatggagagaact

SEQ ID NO: 2272 - DNA, 16 bp, synthetic construct
  misc_feature 1..16: note = Description of Artificial Sequence: Syntheticoligonucleotide
  source 1..16: mol_type = other DNA
agaacatttgctggtc

SEQ ID NO: 2273 - DNA, 16 bp, synthetic construct
  misc_feature 1..16: note = Description of Artificial Sequence: Syntheticoligonucleotide
  source 1..16: mol_type = other DNA
gcccctctatccaggg

SEQ ID NO: 2274 - DNA, 16 bp, synthetic construct
  misc_feature 1..16: note = Description of Artificial Sequence: Syntheticoligonucleotide
  source 1..16: mol_type = other DNA
ctgcatttcggtgagg

SEQ ID NO: 2275 - DNA, 16 bp, synthetic construct
  misc_feature 1..16: note = Description of Artificial Sequence: Syntheticoligonucleotide
  source 1..16: mol_type = other DNA
ccaactaggcctcctg

SEQ ID NO: 2276 - DNA, 16 bp, synthetic construct
  misc_feature 1..16: note = Description of Artificial Sequence: Syntheticoligonucleotide
  source 1..16: mol_type = other DNA
cactccgccagagatg

SEQ ID NO: 2277 - DNA, 16 bp, synthetic construct
  misc_feature 1..16: note = Description of Artificial Sequence: Syntheticoligonucleotide
  source 1..16: mol_type = other DNA
ggatcctagaatctca

SEQ ID NO: 2278 - DNA, 16 bp, synthetic construct
  misc_feature 1..16: note = Description of Artificial Sequence: Syntheticoligonucleotide
  source 1..16: mol_type = other DNA
agaggacccaggtttg

SEQ ID NO: 2279 - DNA, 16 bp, synthetic construct
  misc_feature 1..16: note = Description of Artificial Sequence: Syntheticoligonucleotide
  source 1..16: mol_type = other DNA
cgacaccacggaggaa

SEQ ID NO: 2280 - DNA, 16 bp, synthetic construct
  misc_feature 1..16: note = Description of Artificial Sequence: Syntheticoligonucleotide
  source 1..16: mol_type = other DNA
gcatctgggccctgtt

SEQ ID NO: 2281 - DNA, 16 bp, synthetic construct
  misc_feature 1..16: note = Description of Artificial Sequence: Syntheticoligonucleotide
  source 1..16: mol_type = other DNA
caaacacatgtgggat

SEQ ID NO: 2282 - DNA, 16 bp, synthetic construct
  misc_feature 1..16: note = Description of Artificial Sequence: Syntheticoligonucleotide
  source 1..16: mol_type = other DNA
gatcaatttctgttgc

SEQ ID NO: 2283 - DNA, 16 bp, synthetic construct
  misc_feature 1..16: note = Description of Artificial Sequence: Syntheticoligonucleotide
  source 1..16: mol_type = other DNA
tgagaatccaggtatt

SEQ ID NO: 2284 - DNA, 16 bp, synthetic construct
  misc_feature 1..16: note = Description of Artificial Sequence: Syntheticoligonucleotide
  source 1..16: mol_type = other DNA
tagtcccatagtgact

SEQ ID NO: 2285 - DNA, 16 bp, synthetic construct
  misc_feature 1..16: note = Description of Artificial Sequence: Syntheticoligonucleotide
  source 1..16: mol_type = other DNA
cttctattgtcctcac

SEQ ID NO: 2286 - DNA, 16 bp, synthetic construct
  misc_feature 1..16: note = Description of Artificial Sequence: Syntheticoligonucleotide
  source 1..16: mol_type = other DNA
agtgtgatcatgcacg

SEQ ID NO: 2287 - DNA, 16 bp, synthetic construct
  misc_feature 1..16: note = Description of Artificial Sequence: Syntheticoligonucleotide
  source 1..16: mol_type = other DNA
tgacattacctgagat

SEQ ID NO: 2288 - DNA, 16 bp, synthetic construct
  misc_feature 1..16: note = Description of Artificial Sequence: Syntheticoligonucleotide
  source 1..16: mol_type = other DNA
agacttaatctgaagc

SEQ ID NO: 2289 - DNA, 16 bp, synthetic construct
  misc_feature 1..16: note = Description of Artificial Sequence: Syntheticoligonucleotide
  source 1..16: mol_type = other DNA
attttgccccagtgac

SEQ ID NO: 2290 - DNA, 16 bp, synthetic construct
  misc_feature 1..16: note = Description of Artificial Sequence: Syntheticoligonucleotide
  source 1..16: mol_type = other DNA
gccctggtgtggatgt

SEQ ID NO: 2291 - DNA, 16 bp, synthetic construct
  misc_feature 1..16: note = Description of Artificial Sequence: Syntheticoligonucleotide
  source 1..16: mol_type = other DNA
agggcggtatgagata

SEQ ID NO: 2292 - DNA, 16 bp, synthetic construct
  misc_feature 1..16: note = Description of Artificial Sequence: Syntheticoligonucleotide
  source 1..16: mol_type = other DNA
tccaatctctgaggcc

SEQ ID NO: 2293 - DNA, 16 bp, synthetic construct
  misc_feature 1..16: note = Description of Artificial Sequence: Syntheticoligonucleotide
  source 1..16: mol_type = other DNA
atggtagatgctatga

SEQ ID NO: 2294 - DNA, 16 bp, synthetic construct
  misc_feature 1..16: note = Description of Artificial Sequence: Syntheticoligonucleotide
  source 1..16: mol_type = other DNA
accgttgagagctggg

SEQ ID NO: 2295 - DNA, 16 bp, synthetic construct
  misc_feature 1..16: note = Description of Artificial Sequence: Syntheticoligonucleotide
  source 1..16: mol_type = other DNA
tggagtttccaagcct

SEQ ID NO: 2296 - DNA, 16 bp, synthetic construct
  misc_feature 1..16: note = Description of Artificial Sequence: Syntheticoligonucleotide
  source 1..16: mol_type = other DNA
gacggccattcgcagg

SEQ ID NO: 2297 - DNA, 16 bp, synthetic construct
  misc_feature 1..16: note = Description of Artificial Sequence: Syntheticoligonucleotide
  source 1..16: mol_type = other DNA
cggtagactggcacag

SEQ ID NO: 2298 - DNA, 16 bp, synthetic construct
  misc_feature 1..16: note = Description of Artificial Sequence: Syntheticoligonucleotide
  source 1..16: mol_type = other DNA
actgggagattttgat

SEQ ID NO: 2299 - DNA, 16 bp, synthetic construct
  misc_feature 1..16: note = Description of Artificial Sequence: Syntheticoligonucleotide
  source 1..16: mol_type = other DNA
tctagaggagctagaa

SEQ ID NO: 2300 - DNA, 16 bp, synthetic construct
  misc_feature 1..16: note = Description of Artificial Sequence: Syntheticoligonucleotide
  source 1..16: mol_type = other DNA
tagggagaagattcca

SEQ ID NO: 2301 - DNA, 16 bp, synthetic construct
  misc_feature 1..16: note = Description of Artificial Sequence: Syntheticoligonucleotide
  source 1..16: mol_type = other DNA
aggtgaacttggtttc

SEQ ID NO: 2302 - DNA, 16 bp, synthetic construct
  misc_feature 1..16: note = Description of Artificial Sequence: Syntheticoligonucleotide
  source 1..16: mol_type = other DNA
acctgaatgtgaggtt

SEQ ID NO: 2303 - DNA, 16 bp, synthetic construct
  misc_feature 1..16: note = Description of Artificial Sequence: Syntheticoligonucleotide
  source 1..16: mol_type = other DNA
ctgtggtcgccatctt

SEQ ID NO: 2304 - DNA, 16 bp, synthetic construct
  misc_feature 1..16: note = Description of Artificial Sequence: Syntheticoligonucleotide
  source 1..16: mol_type = other DNA
agccgtatttattaga

SEQ ID NO: 2305 - DNA, 16 bp, synthetic construct
  misc_feature 1..16: note = Description of Artificial Sequence: Syntheticoligonucleotide
  source 1..16: mol_type = other DNA
tagtgcaaggaccatt

SEQ ID NO: 2306 - DNA, 16 bp, synthetic construct
  misc_feature 1..16: note = Description of Artificial Sequence: Syntheticoligonucleotide
  source 1..16: mol_type = other DNA
acactcgagaccatat

SEQ ID NO: 2307 - DNA, 16 bp, synthetic construct
  misc_feature 1..16: note = Description of Artificial Sequence: Syntheticoligonucleotide
  source 1..16: mol_type = other DNA
attacttagcagggtc

SEQ ID NO: 2308 - DNA, 16 bp, synthetic construct
  misc_feature 1..16: note = Description of Artificial Sequence: Syntheticoligonucleotide
  source 1..16: mol_type = other DNA
ggtgagctcgggcgaa

SEQ ID NO: 2309 - DNA, 16 bp, synthetic construct
  misc_feature 1..16: note = Description of Artificial Sequence: Syntheticoligonucleotide
  source 1..16: mol_type = other DNA
aagcggagtaacttgc

SEQ ID NO: 2310 - DNA, 16 bp, synthetic construct
  misc_feature 1..16: note = Description of Artificial Sequence: Syntheticoligonucleotide
  source 1..16: mol_type = other DNA
gggcacaggtactgtt

SEQ ID NO: 2311 - DNA, 16 bp, synthetic construct
  misc_feature 1..16: note = Description of Artificial Sequence: Syntheticoligonucleotide
  source 1..16: mol_type = other DNA
tcctagctagctccct

SEQ ID NO: 2312 - DNA, 16 bp, synthetic construct
  misc_feature 1..16: note = Description of Artificial Sequence: Syntheticoligonucleotide
  source 1..16: mol_type = other DNA
aggaacccactctgag

SEQ ID NO: 2313 - DNA, 16 bp, synthetic construct
  misc_feature 1..16: note = Description of Artificial Sequence: Syntheticoligonucleotide
  source 1..16: mol_type = other DNA
ggctgaggtggacatc

SEQ ID NO: 2314 - DNA, 16 bp, synthetic construct
  misc_feature 1..16: note = Description of Artificial Sequence: Syntheticoligonucleotide
  source 1..16: mol_type = other DNA
ttgggaatggtgccca

SEQ ID NO: 2315 - DNA, 16 bp, synthetic construct
  misc_feature 1..16: note = Description of Artificial Sequence: Syntheticoligonucleotide
  source 1..16: mol_type = other DNA
gctaggtcagggtttc

SEQ ID NO: 2316 - DNA, 16 bp, synthetic construct
  misc_feature 1..16: note = Description of Artificial Sequence: Syntheticoligonucleotide
  source 1..16: mol_type = other DNA
ggttaggctcagggca

SEQ ID NO: 2317 - DNA, 16 bp, synthetic construct
  misc_feature 1..16: note = Description of Artificial Sequence: Syntheticoligonucleotide
  source 1..16: mol_type = other DNA
gtgaaaggtctgggat

SEQ ID NO: 2318 - DNA, 16 bp, synthetic construct
  misc_feature 1..16: note = Description of Artificial Sequence: Syntheticoligonucleotide
  source 1..16: mol_type = other DNA
gcaggtaatcagggac

SEQ ID NO: 2319 - DNA, 16 bp, synthetic construct
  misc_feature 1..16: note = Description of Artificial Sequence: Syntheticoligonucleotide
  source 1..16: mol_type = other DNA
cgtatcaaaaacaact

SEQ ID NO: 2320 - DNA, 16 bp, synthetic construct
  misc_feature 1..16: note = Description of Artificial Sequence: Syntheticoligonucleotide
  source 1..16: mol_type = other DNA
gctttgggtgcagccc

SEQ ID NO: 2321 - DNA, 16 bp, synthetic construct
  misc_feature 1..16: note = Description of Artificial Sequence: Syntheticoligonucleotide
  source 1..16: mol_type = other DNA
gcgatggtggcatggg

SEQ ID NO: 2322 - DNA, 16 bp, synthetic construct
  misc_feature 1..16: note = Description of Artificial Sequence: Syntheticoligonucleotide
  source 1..16: mol_type = other DNA
atcatggctgggctct

SEQ ID NO: 2323 - DNA, 16 bp, synthetic construct
  misc_feature 1..16: note = Description of Artificial Sequence: Syntheticoligonucleotide
  source 1..16: mol_type = other DNA
cagccgaaagggtgct

SEQ ID NO: 2324 - DNA, 16 bp, synthetic construct
  misc_feature 1..16: note = Description of Artificial Sequence: Syntheticoligonucleotide
  source 1..16: mol_type = other DNA
agaagatggtccgcct

SEQ ID NO: 2325 - DNA, 16 bp, synthetic construct
  misc_feature 1..16: note = Description of Artificial Sequence: Syntheticoligonucleotide
  source 1..16: mol_type = other DNA
ctacgatgcagcagga

SEQ ID NO: 2326 - DNA, 16 bp, synthetic construct
  misc_feature 1..16: note = Description of Artificial Sequence: Syntheticoligonucleotide
  source 1..16: mol_type = other DNA
acttgaagtagtccat

SEQ ID NO: 2327 - DNA, 16 bp, synthetic construct
  misc_feature 1..16: note = Description of Artificial Sequence: Syntheticoligonucleotide
  source 1..16: mol_type = other DNA
ggaactccagctcatc

SEQ ID NO: 2328 - DNA, 16 bp, synthetic construct
  misc_feature 1..16: note = Description of Artificial Sequence: Syntheticoligonucleotide
  source 1..16: mol_type = other DNA
cagggcctatcatccc

SEQ ID NO: 2329 - DNA, 16 bp, synthetic construct
  misc_feature 1..16: note = Description of Artificial Sequence: Syntheticoligonucleotide
  source 1..16: mol_type = other DNA
cctgaagtaatctgtg

SEQ ID NO: 2330 - DNA, 16 bp, synthetic construct
  misc_feature 1..16: note = Description of Artificial Sequence: Syntheticoligonucleotide
  source 1..16: mol_type = other DNA
tgtgatgatgcagctt

SEQ ID NO: 2331 - DNA, 16 bp, synthetic construct
  misc_feature 1..16: note = Description of Artificial Sequence: Syntheticoligonucleotide
  source 1..16: mol_type = other DNA
cgggactcaagagacc

SEQ ID NO: 2332 - DNA, 16 bp, synthetic construct
  misc_feature 1..16: note = Description of Artificial Sequence: Syntheticoligonucleotide
  source 1..16: mol_type = other DNA
tcggctgcagtttatt

SEQ ID NO: 2333 - DNA, 16 bp, synthetic construct
  misc_feature 1..16: note = Description of Artificial Sequence: Syntheticoligonucleotide
  source 1..16: mol_type = other DNA
agtcaccgccacctca

SEQ ID NO: 2334 - DNA, 16 bp, synthetic construct
  misc_feature 1..16: note = Description of Artificial Sequence: Syntheticoligonucleotide
  source 1..16: mol_type = other DNA
caacaacccacatccc

SEQ ID NO: 2335 - DNA, 16 bp, synthetic construct
  misc_feature 1..16: note = Description of Artificial Sequence: Syntheticoligonucleotide
  source 1..16: mol_type = other DNA
ggaatcacggtagctg

SEQ ID NO: 2336 - DNA, 16 bp, synthetic construct
  misc_feature 1..16: note = Description of Artificial Sequence: Syntheticoligonucleotide
  source 1..16: mol_type = other DNA
aagactggcagctgac

SEQ ID NO: 2337 - DNA, 16 bp, synthetic construct
  misc_feature 1..16: note = Description of Artificial Sequence: Syntheticoligonucleotide
  source 1..16: mol_type = other DNA
gccaggagagatgcgg

SEQ ID NO: 2338 - DNA, 16 bp, synthetic construct
  misc_feature 1..16: note = Description of Artificial Sequence: Syntheticoligonucleotide
  source 1..16: mol_type = other DNA
ctcggcgacattacta

SEQ ID NO: 2339 - DNA, 16 bp, synthetic construct
  misc_feature 1..16: note = Description of Artificial Sequence: Syntheticoligonucleotide
  source 1..16: mol_type = other DNA
gcaaagttcagttaag

SEQ ID NO: 2340 - DNA, 16 bp, synthetic construct
  misc_feature 1..16: note = Description of Artificial Sequence: Syntheticoligonucleotide
  source 1..16: mol_type = other DNA
gaatatggactctggt

SEQ ID NO: 2341 - DNA, 16 bp, synthetic construct
  misc_feature 1..16: note = Description of Artificial Sequence: Syntheticoligonucleotide
  source 1..16: mol_type = other DNA
caatcaaagttcatgc

SEQ ID NO: 2342 - DNA, 16 bp, synthetic construct
  misc_feature 1..16: note = Description of Artificial Sequence: Syntheticoligonucleotide
  source 1..16: mol_type = other DNA
cagagagggtcataaa

SEQ ID NO: 2343 - DNA, 16 bp, synthetic construct
  misc_feature 1..16: note = Description of Artificial Sequence: Syntheticoligonucleotide
  source 1..16: mol_type = other DNA
agtaaggacatgacca

SEQ ID NO: 2344 - DNA, 16 bp, synthetic construct
  misc_feature 1..16: note = Description of Artificial Sequence: Syntheticoligonucleotide
  source 1..16: mol_type = other DNA
ggctgatgaaaggtta

SEQ ID NO: 2345 - DNA, 16 bp, synthetic construct
  misc_feature 1..16: note = Description of Artificial Sequence: Syntheticoligonucleotide
  source 1..16: mol_type = other DNA
actagaagccaacata

SEQ ID NO: 2346 - DNA, 16 bp, synthetic construct
  misc_feature 1..16: note = Description of Artificial Sequence: Syntheticoligonucleotide
  source 1..16: mol_type = other DNA
ctattataaccattgc

SEQ ID NO: 2347 - DNA, 16 bp, synthetic construct
  misc_feature 1..16: note = Description of Artificial Sequence: Syntheticoligonucleotide
  source 1..16: mol_type = other DNA
ttatcccaacaacccc

SEQ ID NO: 2348 - DNA, 16 bp, synthetic construct
  misc_feature 1..16: note = Description of Artificial Sequence: Syntheticoligonucleotide
  source 1..16: mol_type = other DNA
cacatatggagagaac

SEQ ID NO: 2349 - DNA, 16 bp, synthetic construct
  misc_feature 1..16: note = Description of Artificial Sequence: Syntheticoligonucleotide
  source 1..16: mol_type = other DNA
ggattgcctcaaataa

SEQ ID NO: 2350 - DNA, 16 bp, synthetic construct
  misc_feature 1..16: note = Description of Artificial Sequence: Syntheticoligonucleotide
  source 1..16: mol_type = other DNA
caattgcccctctatc

SEQ ID NO: 2351 - DNA, 16 bp, synthetic construct
  misc_feature 1..16: note = Description of Artificial Sequence: Syntheticoligonucleotide
  source 1..16: mol_type = other DNA
actctgccgctgcatt

SEQ ID NO: 2352 - DNA, 16 bp, synthetic construct
  misc_feature 1..16: note = Description of Artificial Sequence: Syntheticoligonucleotide
  source 1..16: mol_type = other DNA
gccaactaggcctcct

SEQ ID NO: 2353 - DNA, 16 bp, synthetic construct
  misc_feature 1..16: note = Description of Artificial Sequence: Syntheticoligonucleotide
  source 1..16: mol_type = other DNA
ggccactccgccagag

SEQ ID NO: 2354 - DNA, 16 bp, synthetic construct
  misc_feature 1..16: note = Description of Artificial Sequence: Syntheticoligonucleotide
  source 1..16: mol_type = other DNA
aaggatcctagaatct

SEQ ID NO: 2355 - DNA, 16 bp, synthetic construct
  misc_feature 1..16: note = Description of Artificial Sequence: Syntheticoligonucleotide
  source 1..16: mol_type = other DNA
gagaggacccaggttt

SEQ ID NO: 2356 - DNA, 16 bp, synthetic construct
  misc_feature 1..16: note = Description of Artificial Sequence: Syntheticoligonucleotide
  source 1..16: mol_type = other DNA
atcgacaccacggagg

SEQ ID NO: 2357 - DNA, 16 bp, synthetic construct
  misc_feature 1..16: note = Description of Artificial Sequence: Syntheticoligonucleotide
  source 1..16: mol_type = other DNA
atgttttcatatcggg

SEQ ID NO: 2358 - DNA, 16 bp, synthetic construct
  misc_feature 1..16: note = Description of Artificial Sequence: Syntheticoligonucleotide
  source 1..16: mol_type = other DNA
ccaaacacatgtggga

SEQ ID NO: 2359 - DNA, 16 bp, synthetic construct
  misc_feature 1..16: note = Description of Artificial Sequence: Syntheticoligonucleotide
  source 1..16: mol_type = other DNA
ccttatggcccccaga

SEQ ID NO: 2360 - DNA, 16 bp, synthetic construct
  misc_feature 1..16: note = Description of Artificial Sequence: Syntheticoligonucleotide
  source 1..16: mol_type = other DNA
gtgagaatccaggtat

SEQ ID NO: 2361 - DNA, 16 bp, synthetic construct
  misc_feature 1..16: note = Description of Artificial Sequence: Syntheticoligonucleotide
  source 1..16: mol_type = other DNA
ttccgtagtcccatag

SEQ ID NO: 2362 - DNA, 16 bp, synthetic construct
  misc_feature 1..16: note = Description of Artificial Sequence: Syntheticoligonucleotide
  source 1..16: mol_type = other DNA
gctcttctattgtcct

SEQ ID NO: 2363 - DNA, 16 bp, synthetic construct
  misc_feature 1..16: note = Description of Artificial Sequence: Syntheticoligonucleotide
  source 1..16: mol_type = other DNA
tccaggagtgtgatca

SEQ ID NO: 2364 - DNA, 16 bp, synthetic construct
  misc_feature 1..16: note = Description of Artificial Sequence: Syntheticoligonucleotide
  source 1..16: mol_type = other DNA
gctgacattacctgag

SEQ ID NO: 2365 - DNA, 16 bp, synthetic construct
  misc_feature 1..16: note = Description of Artificial Sequence: Syntheticoligonucleotide
  source 1..16: mol_type = other DNA
tctgagacttaatctg

SEQ ID NO: 2366 - DNA, 16 bp, synthetic construct
  misc_feature 1..16: note = Description of Artificial Sequence: Syntheticoligonucleotide
  source 1..16: mol_type = other DNA
ctattttgccccagtg

SEQ ID NO: 2367 - DNA, 16 bp, synthetic construct
  misc_feature 1..16: note = Description of Artificial Sequence: Syntheticoligonucleotide
  source 1..16: mol_type = other DNA
agccctggtgtggatg

SEQ ID NO: 2368 - DNA, 16 bp, synthetic construct
  misc_feature 1..16: note = Description of Artificial Sequence: Syntheticoligonucleotide
  source 1..16: mol_type = other DNA
gctagggcggtatgag

SEQ ID NO: 2369 - DNA, 16 bp, synthetic construct
  misc_feature 1..16: note = Description of Artificial Sequence: Syntheticoligonucleotide
  source 1..16: mol_type = other DNA
ctccaatctctgaggc

SEQ ID NO: 2370 - DNA, 16 bp, synthetic construct
  misc_feature 1..16: note = Description of Artificial Sequence: Syntheticoligonucleotide
  source 1..16: mol_type = other DNA
catggtagatgctatg

SEQ ID NO: 2371 - DNA, 16 bp, synthetic construct
  misc_feature 1..16: note = Description of Artificial Sequence: Syntheticoligonucleotide
  source 1..16: mol_type = other DNA
taccaggtgggaggcc

SEQ ID NO: 2372 - DNA, 16 bp, synthetic construct
  misc_feature 1..16: note = Description of Artificial Sequence: Syntheticoligonucleotide
  source 1..16: mol_type = other DNA
taaggttctgcacctg

SEQ ID NO: 2373 - DNA, 16 bp, synthetic construct
  misc_feature 1..16: note = Description of Artificial Sequence: Syntheticoligonucleotide
  source 1..16: mol_type = other DNA
agacggccattcgcag

SEQ ID NO: 2374 - DNA, 16 bp, synthetic construct
  misc_feature 1..16: note = Description of Artificial Sequence: Syntheticoligonucleotide
  source 1..16: mol_type = other DNA
gccggtagactggcac

SEQ ID NO: 2375 - DNA, 16 bp, synthetic construct
  misc_feature 1..16: note = Description of Artificial Sequence: Syntheticoligonucleotide
  source 1..16: mol_type = other DNA
ggaactgggagatttt

SEQ ID NO: 2376 - DNA, 16 bp, synthetic construct
  misc_feature 1..16: note = Description of Artificial Sequence: Syntheticoligonucleotide
  source 1..16: mol_type = other DNA
atctagaggagctaga

SEQ ID NO: 2377 - DNA, 16 bp, synthetic construct
  misc_feature 1..16: note = Description of Artificial Sequence: Syntheticoligonucleotide
  source 1..16: mol_type = other DNA
gtagggagaagattcc

SEQ ID NO: 2378 - DNA, 16 bp, synthetic construct
  misc_feature 1..16: note = Description of Artificial Sequence: Syntheticoligonucleotide
  source 1..16: mol_type = other DNA
ccaggtgaacttggtt

SEQ ID NO: 2379 - DNA, 16 bp, synthetic construct
  misc_feature 1..16: note = Description of Artificial Sequence: Syntheticoligonucleotide
  source 1..16: mol_type = other DNA
ccctagctctcaggac

SEQ ID NO: 2380 - DNA, 16 bp, synthetic construct
  misc_feature 1..16: note = Description of Artificial Sequence: Syntheticoligonucleotide
  source 1..16: mol_type = other DNA
tctgtggtcgccatct

SEQ ID NO: 2381 - DNA, 16 bp, synthetic construct
  misc_feature 1..16: note = Description of Artificial Sequence: Syntheticoligonucleotide
  source 1..16: mol_type = other DNA
catgagccgtatttat

SEQ ID NO: 2382 - DNA, 16 bp, synthetic construct
  misc_feature 1..16: note = Description of Artificial Sequence: Syntheticoligonucleotide
  source 1..16: mol_type = other DNA
gtagtgcaaggaccat

SEQ ID NO: 2383 - DNA, 16 bp, synthetic construct
  misc_feature 1..16: note = Description of Artificial Sequence: Syntheticoligonucleotide
  source 1..16: mol_type = other DNA
cgacactcgagaccat

SEQ ID NO: 2384 - DNA, 16 bp, synthetic construct
  misc_feature 1..16: note = Description of Artificial Sequence: Syntheticoligonucleotide
  source 1..16: mol_type = other DNA
aattacttagcagggt

SEQ ID NO: 2385 - DNA, 16 bp, synthetic construct
  misc_feature 1..16: note = Description of Artificial Sequence: Syntheticoligonucleotide
  source 1..16: mol_type = other DNA
gataggtgagctcggg

SEQ ID NO: 2386 - DNA, 16 bp, synthetic construct
  misc_feature 1..16: note = Description of Artificial Sequence: Syntheticoligonucleotide
  source 1..16: mol_type = other DNA
gaagcggagtaacttg

SEQ ID NO: 2387 - DNA, 16 bp, synthetic construct
  misc_feature 1..16: note = Description of Artificial Sequence: Syntheticoligonucleotide
  source 1..16: mol_type = other DNA
acgggcacaggtactg

SEQ ID NO: 2388 - DNA, 16 bp, synthetic construct
  misc_feature 1..16: note = Description of Artificial Sequence: Syntheticoligonucleotide
  source 1..16: mol_type = other DNA
ctcctagctagctccc

SEQ ID NO: 2389 - DNA, 16 bp, synthetic construct
  misc_feature 1..16: note = Description of Artificial Sequence: Syntheticoligonucleotide
  source 1..16: mol_type = other DNA
gaggaacccactctga

SEQ ID NO: 2390 - DNA, 16 bp, synthetic construct
  misc_feature 1..16: note = Description of Artificial Sequence: Syntheticoligonucleotide
  source 1..16: mol_type = other DNA
agagggttaggtatgg

SEQ ID NO: 2391 - DNA, 16 bp, synthetic construct
  misc_feature 1..16: note = Description of Artificial Sequence: Syntheticoligonucleotide
  source 1..16: mol_type = other DNA
gaaaggttgggaatgg

SEQ ID NO: 2392 - DNA, 16 bp, synthetic construct
  misc_feature 1..16: note = Description of Artificial Sequence: Syntheticoligonucleotide
  source 1..16: mol_type = other DNA
agtgaggctatcagtc

SEQ ID NO: 2393 - DNA, 16 bp, synthetic construct
  misc_feature 1..16: note = Description of Artificial Sequence: Syntheticoligonucleotide
  source 1..16: mol_type = other DNA
gttaggtggttaggct

SEQ ID NO: 2394 - DNA, 16 bp, synthetic construct
  misc_feature 1..16: note = Description of Artificial Sequence: Syntheticoligonucleotide
  source 1..16: mol_type = other DNA
ggtgaaaggtctggga

SEQ ID NO: 2395 - DNA, 16 bp, synthetic construct
  misc_feature 1..16: note = Description of Artificial Sequence: Syntheticoligonucleotide
  source 1..16: mol_type = other DNA
agccatctgacatggg

SEQ ID NO: 2396 - DNA, 16 bp, synthetic construct
  misc_feature 1..16: note = Description of Artificial Sequence: Syntheticoligonucleotide
  source 1..16: mol_type = other DNA
gtgggaaactgtcacg

SEQ ID NO: 2397 - DNA, 16 bp, synthetic construct
  misc_feature 1..16: note = Description of Artificial Sequence: Syntheticoligonucleotide
  source 1..16: mol_type = other DNA
aggctttgggtgcagc

SEQ ID NO: 2398 - DNA, 16 bp, synthetic construct
  misc_feature 1..16: note = Description of Artificial Sequence: Syntheticoligonucleotide
  source 1..16: mol_type = other DNA
ctgcgatggtggcatg

SEQ ID NO: 2399 - DNA, 16 bp, synthetic construct
  misc_feature 1..16: note = Description of Artificial Sequence: Syntheticoligonucleotide
  source 1..16: mol_type = other DNA
gctgatcatggctggg

SEQ ID NO: 2400 - DNA, 16 bp, synthetic construct
  misc_feature 1..16: note = Description of Artificial Sequence: Syntheticoligonucleotide
  source 1..16: mol_type = other DNA
acagccgaaagggtgc

SEQ ID NO: 2401 - DNA, 16 bp, synthetic construct
  misc_feature 1..16: note = Description of Artificial Sequence: Syntheticoligonucleotide
  source 1..16: mol_type = other DNA
cagaagatggtccgcc

SEQ ID NO: 2402 - DNA, 16 bp, synthetic construct
  misc_feature 1..16: note = Description of Artificial Sequence: Syntheticoligonucleotide
  source 1..16: mol_type = other DNA
agctacgatgcagcag

SEQ ID NO: 2403 - DNA, 16 bp, synthetic construct
  misc_feature 1..16: note = Description of Artificial Sequence: Syntheticoligonucleotide
  source 1..16: mol_type = other DNA
aacttgaagtagtcca

SEQ ID NO: 2404 - DNA, 16 bp, synthetic construct
  misc_feature 1..16: note = Description of Artificial Sequence: Syntheticoligonucleotide
  source 1..16: mol_type = other DNA
cggaactccagctcat

SEQ ID NO: 2405 - DNA, 16 bp, synthetic construct
  misc_feature 1..16: note = Description of Artificial Sequence: Syntheticoligonucleotide
  source 1..16: mol_type = other DNA
ccagggcctatcatcc

SEQ ID NO: 2406 - DNA, 16 bp, synthetic construct
  misc_feature 1..16: note = Description of Artificial Sequence: Syntheticoligonucleotide
  source 1..16: mol_type = other DNA
ccctgaagtaatctgt

SEQ ID NO: 2407 - DNA, 16 bp, synthetic construct
  misc_feature 1..16: note = Description of Artificial Sequence: Syntheticoligonucleotide
  source 1..16: mol_type = other DNA
gtgtgatgatgcagct

SEQ ID NO: 2408 - DNA, 16 bp, synthetic construct
  misc_feature 1..16: note = Description of Artificial Sequence: Syntheticoligonucleotide
  source 1..16: mol_type = other DNA
acgggactcaagagac

SEQ ID NO: 2409 - DNA, 16 bp, synthetic construct
  misc_feature 1..16: note = Description of Artificial Sequence: Syntheticoligonucleotide
  source 1..16: mol_type = other DNA
ctcggctgcagtttat

SEQ ID NO: 2410 - DNA, 16 bp, synthetic construct
  misc_feature 1..16: note = Description of Artificial Sequence: Syntheticoligonucleotide
  source 1..16: mol_type = other DNA
cccagtcaccgccacc

SEQ ID NO: 2411 - DNA, 16 bp, synthetic construct
  misc_feature 1..16: note = Description of Artificial Sequence: Syntheticoligonucleotide
  source 1..16: mol_type = other DNA
ccaacaacccacatcc

SEQ ID NO: 2412 - DNA, 16 bp, synthetic construct
  misc_feature 1..16: note = Description of Artificial Sequence: Syntheticoligonucleotide
  source 1..16: mol_type = other DNA
tggaatcacggtagct

SEQ ID NO: 2413 - DNA, 16 bp, synthetic construct
  misc_feature 1..16: note = Description of Artificial Sequence: Syntheticoligonucleotide
  source 1..16: mol_type = other DNA
cataaagactggcagc

SEQ ID NO: 2414 - DNA, 16 bp, synthetic construct
  misc_feature 1..16: note = Description of Artificial Sequence: Syntheticoligonucleotide
  source 1..16: mol_type = other DNA
ggccaggagagatgcg

SEQ ID NO: 2415 - DNA, 16 bp, synthetic construct
  misc_feature 1..16: note = Description of Artificial Sequence: Syntheticoligonucleotide
  source 1..16: mol_type = other DNA
tcctcggcgacattac

SEQ ID NO: 2416 - DNA, 16 bp, synthetic construct
  misc_feature 1..16: note = Description of Artificial Sequence: Syntheticoligonucleotide
  source 1..16: mol_type = other DNA
gatacaagcaaagttc

SEQ ID NO: 2417 - DNA, 16 bp, synthetic construct
  misc_feature 1..16: note = Description of Artificial Sequence: Syntheticoligonucleotide
  source 1..16: mol_type = other DNA
ctgaatatggactctg

SEQ ID NO: 2418 - DNA, 16 bp, synthetic construct
  misc_feature 1..16: note = Description of Artificial Sequence: Syntheticoligonucleotide
  source 1..16: mol_type = other DNA
tcaatcaaagttcatg

SEQ ID NO: 2419 - DNA, 16 bp, synthetic construct
  misc_feature 1..16: note = Description of Artificial Sequence: Syntheticoligonucleotide
  source 1..16: mol_type = other DNA
gcagagagggtcataa

SEQ ID NO: 2420 - DNA, 16 bp, synthetic construct
  misc_feature 1..16: note = Description of Artificial Sequence: Syntheticoligonucleotide
  source 1..16: mol_type = other DNA
gagtaaggacatgacc

SEQ ID NO: 2421 - DNA, 16 bp, synthetic construct
  misc_feature 1..16: note = Description of Artificial Sequence: Syntheticoligonucleotide
  source 1..16: mol_type = other DNA
atggctgatgaaaggt

SEQ ID NO: 2422 - DNA, 16 bp, synthetic construct
  misc_feature 1..16: note = Description of Artificial Sequence: Syntheticoligonucleotide
  source 1..16: mol_type = other DNA
gactagaagccaacat

SEQ ID NO: 2423 - DNA, 16 bp, synthetic construct
  misc_feature 1..16: note = Description of Artificial Sequence: Syntheticoligonucleotide
  source 1..16: mol_type = other DNA
ctcctgaggaaggtac

SEQ ID NO: 2424 - DNA, 16 bp, synthetic construct
  misc_feature 1..16: note = Description of Artificial Sequence: Syntheticoligonucleotide
  source 1..16: mol_type = other DNA
cattatcccaacaacc

SEQ ID NO: 2425 - DNA, 16 bp, synthetic construct
  misc_feature 1..16: note = Description of Artificial Sequence: Syntheticoligonucleotide
  source 1..16: mol_type = other DNA
acccacatatggagag

SEQ ID NO: 2426 - DNA, 16 bp, synthetic construct
  misc_feature 1..16: note = Description of Artificial Sequence: Syntheticoligonucleotide
  source 1..16: mol_type = other DNA
gaggattgcctcaaat

SEQ ID NO: 2427 - DNA, 16 bp, synthetic construct
  misc_feature 1..16: note = Description of Artificial Sequence: Syntheticoligonucleotide
  source 1..16: mol_type = other DNA
cttcaagttgacaatt

SEQ ID NO: 2428 - DNA, 16 bp, synthetic construct
  misc_feature 1..16: note = Description of Artificial Sequence: Syntheticoligonucleotide
  source 1..16: mol_type = other DNA
gatttcaactctgccg

SEQ ID NO: 2429 - DNA, 16 bp, synthetic construct
  misc_feature 1..16: note = Description of Artificial Sequence: Syntheticoligonucleotide
  source 1..16: mol_type = other DNA
ggccaactaggcctcc

SEQ ID NO: 2430 - DNA, 16 bp, synthetic construct
  misc_feature 1..16: note = Description of Artificial Sequence: Syntheticoligonucleotide
  source 1..16: mol_type = other DNA
atggccactccgccag

SEQ ID NO: 2431 - DNA, 16 bp, synthetic construct
  misc_feature 1..16: note = Description of Artificial Sequence: Syntheticoligonucleotide
  source 1..16: mol_type = other DNA
aaaggatcctagaatc

SEQ ID NO: 2432 - DNA, 16 bp, synthetic construct
  misc_feature 1..16: note = Description of Artificial Sequence: Syntheticoligonucleotide
  source 1..16: mol_type = other DNA
ggagaggacccaggtt

SEQ ID NO: 2433 - DNA, 16 bp, synthetic construct
  misc_feature 1..16: note = Description of Artificial Sequence: Syntheticoligonucleotide
  source 1..16: mol_type = other DNA
catcgacaccacggag

SEQ ID NO: 2434 - DNA, 16 bp, synthetic construct
  misc_feature 1..16: note = Description of Artificial Sequence: Syntheticoligonucleotide
  source 1..16: mol_type = other DNA
tatgttttcatatcgg

SEQ ID NO: 2435 - DNA, 16 bp, synthetic construct
  misc_feature 1..16: note = Description of Artificial Sequence: Syntheticoligonucleotide
  source 1..16: mol_type = other DNA
cccaaacacatgtggg

SEQ ID NO: 2436 - DNA, 16 bp, synthetic construct
  misc_feature 1..16: note = Description of Artificial Sequence: Syntheticoligonucleotide
  source 1..16: mol_type = other DNA
cccttatggcccccag

SEQ ID NO: 2437 - DNA, 16 bp, synthetic construct
  misc_feature 1..16: note = Description of Artificial Sequence: Syntheticoligonucleotide
  source 1..16: mol_type = other DNA
gtgtgagaatccaggt

SEQ ID NO: 2438 - DNA, 16 bp, synthetic construct
  misc_feature 1..16: note = Description of Artificial Sequence: Syntheticoligonucleotide
  source 1..16: mol_type = other DNA
gccgagttccgtagtc

SEQ ID NO: 2439 - DNA, 16 bp, synthetic construct
  misc_feature 1..16: note = Description of Artificial Sequence: Syntheticoligonucleotide
  source 1..16: mol_type = other DNA
acgcaagacctgctct

SEQ ID NO: 2440 - DNA, 16 bp, synthetic construct
  misc_feature 1..16: note = Description of Artificial Sequence: Syntheticoligonucleotide
  source 1..16: mol_type = other DNA
gtccaggagtgtgatc

SEQ ID NO: 2441 - DNA, 16 bp, synthetic construct
  misc_feature 1..16: note = Description of Artificial Sequence: Syntheticoligonucleotide
  source 1..16: mol_type = other DNA
agctgacattacctga

SEQ ID NO: 2442 - DNA, 16 bp, synthetic construct
  misc_feature 1..16: note = Description of Artificial Sequence: Syntheticoligonucleotide
  source 1..16: mol_type = other DNA
gattctgagacttaat

SEQ ID NO: 2443 - DNA, 16 bp, synthetic construct
  misc_feature 1..16: note = Description of Artificial Sequence: Syntheticoligonucleotide
  source 1..16: mol_type = other DNA
cctattttgccccagt

SEQ ID NO: 2444 - DNA, 16 bp, synthetic construct
  misc_feature 1..16: note = Description of Artificial Sequence: Syntheticoligonucleotide
  source 1..16: mol_type = other DNA
cagccctggtgtggat

SEQ ID NO: 2445 - DNA, 16 bp, synthetic construct
  misc_feature 1..16: note = Description of Artificial Sequence: Syntheticoligonucleotide
  source 1..16: mol_type = other DNA
gtgctagggcggtatg

SEQ ID NO: 2446 - DNA, 16 bp, synthetic construct
  misc_feature 1..16: note = Description of Artificial Sequence: Syntheticoligonucleotide
  source 1..16: mol_type = other DNA
gcctccaatctctgag

SEQ ID NO: 2447 - DNA, 16 bp, synthetic construct
  misc_feature 1..16: note = Description of Artificial Sequence: Syntheticoligonucleotide
  source 1..16: mol_type = other DNA
cccacatggtagatgc

SEQ ID NO: 2448 - DNA, 16 bp, synthetic construct
  misc_feature 1..16: note = Description of Artificial Sequence: Syntheticoligonucleotide
  source 1..16: mol_type = other DNA
gttaccaggtgggagg

SEQ ID NO: 2449 - DNA, 16 bp, synthetic construct
  misc_feature 1..16: note = Description of Artificial Sequence: Syntheticoligonucleotide
  source 1..16: mol_type = other DNA
ttaaggttctgcacct

SEQ ID NO: 2450 - DNA, 16 bp, synthetic construct
  misc_feature 1..16: note = Description of Artificial Sequence: Syntheticoligonucleotide
  source 1..16: mol_type = other DNA
aagacggccattcgca

SEQ ID NO: 2451 - DNA, 16 bp, synthetic construct
  misc_feature 1..16: note = Description of Artificial Sequence: Syntheticoligonucleotide
  source 1..16: mol_type = other DNA
gggccggtagactggc

SEQ ID NO: 2452 - DNA, 16 bp, synthetic construct
  misc_feature 1..16: note = Description of Artificial Sequence: Syntheticoligonucleotide
  source 1..16: mol_type = other DNA
tctgtcactcaggaac

SEQ ID NO: 2453 - DNA, 16 bp, synthetic construct
  misc_feature 1..16: note = Description of Artificial Sequence: Syntheticoligonucleotide
  source 1..16: mol_type = other DNA
catctagaggagctag

SEQ ID NO: 2454 - DNA, 16 bp, synthetic construct
  misc_feature 1..16: note = Description of Artificial Sequence: Syntheticoligonucleotide
  source 1..16: mol_type = other DNA
agtagggagaagattc

SEQ ID NO: 2455 - DNA, 16 bp, synthetic construct
  misc_feature 1..16: note = Description of Artificial Sequence: Syntheticoligonucleotide
  source 1..16: mol_type = other DNA
cccaggtgaacttggt

SEQ ID NO: 2456 - DNA, 16 bp, synthetic construct
  misc_feature 1..16: note = Description of Artificial Sequence: Syntheticoligonucleotide
  source 1..16: mol_type = other DNA
catgtttggagctggg

SEQ ID NO: 2457 - DNA, 16 bp, synthetic construct
  misc_feature 1..16: note = Description of Artificial Sequence: Syntheticoligonucleotide
  source 1..16: mol_type = other DNA
tatgtggcaccctgtg

SEQ ID NO: 2458 - DNA, 16 bp, synthetic construct
  misc_feature 1..16: note = Description of Artificial Sequence: Syntheticoligonucleotide
  source 1..16: mol_type = other DNA
caaaacagcatgagcc

SEQ ID NO: 2459 - DNA, 16 bp, synthetic construct
  misc_feature 1..16: note = Description of Artificial Sequence: Syntheticoligonucleotide
  source 1..16: mol_type = other DNA
ggattaggagcttggg

SEQ ID NO: 2460 - DNA, 16 bp, synthetic construct
  misc_feature 1..16: note = Description of Artificial Sequence: Syntheticoligonucleotide
  source 1..16: mol_type = other DNA
cccgacactcgagacc

SEQ ID NO: 2461 - DNA, 16 bp, synthetic construct
  misc_feature 1..16: note = Description of Artificial Sequence: Syntheticoligonucleotide
  source 1..16: mol_type = other DNA
ggaattacttagcagg

SEQ ID NO: 2462 - DNA, 16 bp, synthetic construct
  misc_feature 1..16: note = Description of Artificial Sequence: Syntheticoligonucleotide
  source 1..16: mol_type = other DNA
ggataggtgagctcgg

SEQ ID NO: 2463 - DNA, 16 bp, synthetic construct
  misc_feature 1..16: note = Description of Artificial Sequence: Syntheticoligonucleotide
  source 1..16: mol_type = other DNA
agaagcggagtaactt

SEQ ID NO: 2464 - DNA, 16 bp, synthetic construct
  misc_feature 1..16: note = Description of Artificial Sequence: Syntheticoligonucleotide
  source 1..16: mol_type = other DNA
cacgggcacaggtact

SEQ ID NO: 2465 - DNA, 16 bp, synthetic construct
  misc_feature 1..16: note = Description of Artificial Sequence: Syntheticoligonucleotide
  source 1..16: mol_type = other DNA
cctcctagctagctcc

SEQ ID NO: 2466 - DNA, 16 bp, synthetic construct
  misc_feature 1..16: note = Description of Artificial Sequence: Syntheticoligonucleotide
  source 1..16: mol_type = other DNA
ggaggaacccactctg

SEQ ID NO: 2467 - DNA, 16 bp, synthetic construct
  misc_feature 1..16: note = Description of Artificial Sequence: Syntheticoligonucleotide
  source 1..16: mol_type = other DNA
gagagggttaggtatg

SEQ ID NO: 2468 - DNA, 16 bp, synthetic construct
  misc_feature 1..16: note = Description of Artificial Sequence: Syntheticoligonucleotide
  source 1..16: mol_type = other DNA
tacaaggaaaggttgg

SEQ ID NO: 2469 - DNA, 16 bp, synthetic construct
  misc_feature 1..16: note = Description of Artificial Sequence: Syntheticoligonucleotide
  source 1..16: mol_type = other DNA
cgatgatgattgcagt

SEQ ID NO: 2470 - DNA, 16 bp, synthetic construct
  misc_feature 1..16: note = Description of Artificial Sequence: Syntheticoligonucleotide
  source 1..16: mol_type = other DNA
ggttaggtggttaggc

SEQ ID NO: 2471 - DNA, 16 bp, synthetic construct
  misc_feature 1..16: note = Description of Artificial Sequence: Syntheticoligonucleotide
  source 1..16: mol_type = other DNA
gaggtgaaaggtctgg

SEQ ID NO: 2472 - DNA, 16 bp, synthetic construct
  misc_feature 1..16: note = Description of Artificial Sequence: Syntheticoligonucleotide
  source 1..16: mol_type = other DNA
cccgagccatctgaca

SEQ ID NO: 2473 - DNA, 16 bp, synthetic construct
  misc_feature 1..16: note = Description of Artificial Sequence: Syntheticoligonucleotide
  source 1..16: mol_type = other DNA
ttgtgggaaactgtca

SEQ ID NO: 2474 - DNA, 16 bp, synthetic construct
  misc_feature 1..16: note = Description of Artificial Sequence: Syntheticoligonucleotide
  source 1..16: mol_type = other DNA
agcaggtctgaggctt

SEQ ID NO: 2475 - DNA, 16 bp, synthetic construct
  misc_feature 1..16: note = Description of Artificial Sequence: Syntheticoligonucleotide
  source 1..16: mol_type = other DNA
gctgcgatggtggcat

SEQ ID NO: 2476 - DNA, 16 bp, synthetic construct
  misc_feature 1..16: note = Description of Artificial Sequence: Syntheticoligonucleotide
  source 1..16: mol_type = other DNA
gaggctgatcatggct

SEQ ID NO: 2477 - DNA, 16 bp, synthetic construct
  misc_feature 1..16: note = Description of Artificial Sequence: Syntheticoligonucleotide
  source 1..16: mol_type = other DNA
gcacagccgaaagggt

SEQ ID NO: 2478 - DNA, 16 bp, synthetic construct
  misc_feature 1..16: note = Description of Artificial Sequence: Syntheticoligonucleotide
  source 1..16: mol_type = other DNA
ccagaagatggtccgc

SEQ ID NO: 2479 - DNA, 16 bp, synthetic construct
  misc_feature 1..16: note = Description of Artificial Sequence: Syntheticoligonucleotide
  source 1..16: mol_type = other DNA
cagctacgatgcagca

SEQ ID NO: 2480 - DNA, 16 bp, synthetic construct
  misc_feature 1..16: note = Description of Artificial Sequence: Syntheticoligonucleotide
  source 1..16: mol_type = other DNA
gaacttgaagtagtcc

SEQ ID NO: 2481 - DNA, 16 bp, synthetic construct
  misc_feature 1..16: note = Description of Artificial Sequence: Syntheticoligonucleotide
  source 1..16: mol_type = other DNA
gcggaactccagctca

SEQ ID NO: 2482 - DNA, 16 bp, synthetic construct
  misc_feature 1..16: note = Description of Artificial Sequence: Syntheticoligonucleotide
  source 1..16: mol_type = other DNA
atccagggcctatcat

SEQ ID NO: 2483 - DNA, 16 bp, synthetic construct
  misc_feature 1..16: note = Description of Artificial Sequence: Syntheticoligonucleotide
  source 1..16: mol_type = other DNA
gccctgaagtaatctg

SEQ ID NO: 2484 - DNA, 16 bp, synthetic construct
  misc_feature 1..16: note = Description of Artificial Sequence: Syntheticoligonucleotide
  source 1..16: mol_type = other DNA
tgtgtgatgatgcagc

SEQ ID NO: 2485 - DNA, 16 bp, synthetic construct
  misc_feature 1..16: note = Description of Artificial Sequence: Syntheticoligonucleotide
  source 1..16: mol_type = other DNA
cacgggactcaagaga

SEQ ID NO: 2486 - DNA, 16 bp, synthetic construct
  misc_feature 1..16: note = Description of Artificial Sequence: Syntheticoligonucleotide
  source 1..16: mol_type = other DNA
gagctcggctgcagtt

SEQ ID NO: 2487 - DNA, 16 bp, synthetic construct
  misc_feature 1..16: note = Description of Artificial Sequence: Syntheticoligonucleotide
  source 1..16: mol_type = other DNA
tcccagtcaccgccac

SEQ ID NO: 2488 - DNA, 16 bp, synthetic construct
  misc_feature 1..16: note = Description of Artificial Sequence: Syntheticoligonucleotide
  source 1..16: mol_type = other DNA
caccaacaacccacat

SEQ ID NO: 2489 - DNA, 16 bp, synthetic construct
  misc_feature 1..16: note = Description of Artificial Sequence: Syntheticoligonucleotide
  source 1..16: mol_type = other DNA
ctggaatcacggtagc

SEQ ID NO: 2490 - DNA, 16 bp, synthetic construct
  misc_feature 1..16: note = Description of Artificial Sequence: Syntheticoligonucleotide
  source 1..16: mol_type = other DNA
atccataaagactggc

SEQ ID NO: 2491 - DNA, 16 bp, synthetic construct
  misc_feature 1..16: note = Description of Artificial Sequence: Syntheticoligonucleotide
  source 1..16: mol_type = other DNA
tcaagatggaggagac

SEQ ID NO: 2492 - DNA, 16 bp, synthetic construct
  misc_feature 1..16: note = Description of Artificial Sequence: Syntheticoligonucleotide
  source 1..16: mol_type = other DNA
taaaggtcctcggcga

SEQ ID NO: 2493 - DNA, 16 bp, synthetic construct
  misc_feature 1..16: note = Description of Artificial Sequence: Syntheticoligonucleotide
  source 1..16: mol_type = other DNA
cgatacaagcaaagtt

SEQ ID NO: 2494 - DNA, 16 bp, synthetic construct
  misc_feature 1..16: note = Description of Artificial Sequence: Syntheticoligonucleotide
  source 1..16: mol_type = other DNA
cctgaatatggactct

SEQ ID NO: 2495 - DNA, 16 bp, synthetic construct
  misc_feature 1..16: note = Description of Artificial Sequence: Syntheticoligonucleotide
  source 1..16: mol_type = other DNA
gtcaaatcaatcaaag

SEQ ID NO: 2496 - DNA, 16 bp, synthetic construct
  misc_feature 1..16: note = Description of Artificial Sequence: Syntheticoligonucleotide
  source 1..16: mol_type = other DNA
aattagcagagagggt

SEQ ID NO: 2497 - DNA, 16 bp, synthetic construct
  misc_feature 1..16: note = Description of Artificial Sequence: Syntheticoligonucleotide
  source 1..16: mol_type = other DNA
aggagtaaggacatga

SEQ ID NO: 2498 - DNA, 16 bp, synthetic construct
  misc_feature 1..16: note = Description of Artificial Sequence: Syntheticoligonucleotide
  source 1..16: mol_type = other DNA
gtaatggctgatgaaa

SEQ ID NO: 2499 - DNA, 16 bp, synthetic construct
  misc_feature 1..16: note = Description of Artificial Sequence: Syntheticoligonucleotide
  source 1..16: mol_type = other DNA
agactagaagccaaca

SEQ ID NO: 2500 - DNA, 16 bp, synthetic construct
  misc_feature 1..16: note = Description of Artificial Sequence: Syntheticoligonucleotide
  source 1..16: mol_type = other DNA
actcctgaggaaggta

SEQ ID NO: 2501 - DNA, 16 bp, synthetic construct
  misc_feature 1..16: note = Description of Artificial Sequence: Syntheticoligonucleotide
  source 1..16: mol_type = other DNA
ccattatcccaacaac

SEQ ID NO: 2502 - DNA, 16 bp, synthetic construct
  misc_feature 1..16: note = Description of Artificial Sequence: Syntheticoligonucleotide
  source 1..16: mol_type = other DNA
ttggacatggacccac

SEQ ID NO: 2503 - DNA, 16 bp, synthetic construct
  misc_feature 1..16: note = Description of Artificial Sequence: Syntheticoligonucleotide
  source 1..16: mol_type = other DNA
ggaggattgcctcaaa

SEQ ID NO: 2504 - DNA, 16 bp, synthetic construct
  misc_feature 1..16: note = Description of Artificial Sequence: Syntheticoligonucleotide
  source 1..16: mol_type = other DNA
agggcttcaagttgac

SEQ ID NO: 2505 - DNA, 16 bp, synthetic construct
  misc_feature 1..16: note = Description of Artificial Sequence: Syntheticoligonucleotide
  source 1..16: mol_type = other DNA
ggatttcaactctgcc

SEQ ID NO: 2506 - DNA, 16 bp, synthetic construct
  misc_feature 1..16: note = Description of Artificial Sequence: Syntheticoligonucleotide
  source 1..16: mol_type = other DNA
cgctctggccaactag

SEQ ID NO: 2507 - DNA, 16 bp, synthetic construct
  misc_feature 1..16: note = Description of Artificial Sequence: Syntheticoligonucleotide
  source 1..16: mol_type = other DNA
atacatggccactccg

SEQ ID NO: 2508 - DNA, 16 bp, synthetic construct
  misc_feature 1..16: note = Description of Artificial Sequence: Syntheticoligonucleotide
  source 1..16: mol_type = other DNA
taaaggatcctagaat

SEQ ID NO: 2509 - DNA, 16 bp, synthetic construct
  misc_feature 1..16: note = Description of Artificial Sequence: Syntheticoligonucleotide
  source 1..16: mol_type = other DNA
cttgggttgtggagag

SEQ ID NO: 2510 - DNA, 16 bp, synthetic construct
  misc_feature 1..16: note = Description of Artificial Sequence: Syntheticoligonucleotide
  source 1..16: mol_type = other DNA
tcatcgacaccacgga

SEQ ID NO: 2511 - DNA, 16 bp, synthetic construct
  misc_feature 1..16: note = Description of Artificial Sequence: Syntheticoligonucleotide
  source 1..16: mol_type = other DNA
ttatgttttcatatcg

SEQ ID NO: 2512 - DNA, 16 bp, synthetic construct
  misc_feature 1..16: note = Description of Artificial Sequence: Syntheticoligonucleotide
  source 1..16: mol_type = other DNA
ccccaaacacatgtgg

SEQ ID NO: 2513 - DNA, 16 bp, synthetic construct
  misc_feature 1..16: note = Description of Artificial Sequence: Syntheticoligonucleotide
  source 1..16: mol_type = other DNA
taacaaagattgccag

SEQ ID NO: 2514 - DNA, 16 bp, synthetic construct
  misc_feature 1..16: note = Description of Artificial Sequence: Syntheticoligonucleotide
  source 1..16: mol_type = other DNA
gatgagtgtgagaatc

SEQ ID NO: 2515 - DNA, 16 bp, synthetic construct
  misc_feature 1..16: note = Description of Artificial Sequence: Syntheticoligonucleotide
  source 1..16: mol_type = other DNA
atgccgagttccgtag

SEQ ID NO: 2516 - DNA, 16 bp, synthetic construct
  misc_feature 1..16: note = Description of Artificial Sequence: Syntheticoligonucleotide
  source 1..16: mol_type = other DNA
cacgcaagacctgctc

SEQ ID NO: 2517 - DNA, 16 bp, synthetic construct
  misc_feature 1..16: note = Description of Artificial Sequence: Syntheticoligonucleotide
  source 1..16: mol_type = other DNA
gcgagtccaggagtgt

SEQ ID NO: 2518 - DNA, 16 bp, synthetic construct
  misc_feature 1..16: note = Description of Artificial Sequence: Syntheticoligonucleotide
  source 1..16: mol_type = other DNA
accgagctgacattac

SEQ ID NO: 2519 - DNA, 16 bp, synthetic construct
  misc_feature 1..16: note = Description of Artificial Sequence: Syntheticoligonucleotide
  source 1..16: mol_type = other DNA
gtagattctgagactt

SEQ ID NO: 2520 - DNA, 16 bp, synthetic construct
  misc_feature 1..16: note = Description of Artificial Sequence: Syntheticoligonucleotide
  source 1..16: mol_type = other DNA
gtcctattttgcccca

SEQ ID NO: 2521 - DNA, 16 bp, synthetic construct
  misc_feature 1..16: note = Description of Artificial Sequence: Syntheticoligonucleotide
  source 1..16: mol_type = other DNA
cgctagcacagccctg

SEQ ID NO: 2522 - DNA, 16 bp, synthetic construct
  misc_feature 1..16: note = Description of Artificial Sequence: Syntheticoligonucleotide
  source 1..16: mol_type = other DNA
ggaaaggagtcacacg

SEQ ID NO: 2523 - DNA, 16 bp, synthetic construct
  misc_feature 1..16: note = Description of Artificial Sequence: Syntheticoligonucleotide
  source 1..16: mol_type = other DNA
ggagagcctccaatct

SEQ ID NO: 2524 - DNA, 16 bp, synthetic construct
  misc_feature 1..16: note = Description of Artificial Sequence: Syntheticoligonucleotide
  source 1..16: mol_type = other DNA
gcccacatggtagatg

SEQ ID NO: 2525 - DNA, 16 bp, synthetic construct
  misc_feature 1..16: note = Description of Artificial Sequence: Syntheticoligonucleotide
  source 1..16: mol_type = other DNA
tgttaccaggtgggag

SEQ ID NO: 2526 - DNA, 16 bp, synthetic construct
  misc_feature 1..16: note = Description of Artificial Sequence: Syntheticoligonucleotide
  source 1..16: mol_type = other DNA
tttaaggttctgcacc

SEQ ID NO: 2527 - DNA, 16 bp, synthetic construct
  misc_feature 1..16: note = Description of Artificial Sequence: Syntheticoligonucleotide
  source 1..16: mol_type = other DNA
aaagacggccattcgc

SEQ ID NO: 2528 - DNA, 16 bp, synthetic construct
  misc_feature 1..16: note = Description of Artificial Sequence: Syntheticoligonucleotide
  source 1..16: mol_type = other DNA
ccacaagccagggccg

SEQ ID NO: 2529 - DNA, 16 bp, synthetic construct
  misc_feature 1..16: note = Description of Artificial Sequence: Syntheticoligonucleotide
  source 1..16: mol_type = other DNA
ctagagcctggctaca

SEQ ID NO: 2530 - DNA, 16 bp, synthetic construct
  misc_feature 1..16: note = Description of Artificial Sequence: Syntheticoligonucleotide
  source 1..16: mol_type = other DNA
ccatctagaggagcta

SEQ ID NO: 2531 - DNA, 16 bp, synthetic construct
  misc_feature 1..16: note = Description of Artificial Sequence: Syntheticoligonucleotide
  source 1..16: mol_type = other DNA
taagtagggagaagat

SEQ ID NO: 2532 - DNA, 16 bp, synthetic construct
  misc_feature 1..16: note = Description of Artificial Sequence: Syntheticoligonucleotide
  source 1..16: mol_type = other DNA
tcccaggtgaacttgg

SEQ ID NO: 2533 - DNA, 16 bp, synthetic construct
  misc_feature 1..16: note = Description of Artificial Sequence: Syntheticoligonucleotide
  source 1..16: mol_type = other DNA
tgggcatgtttggagc

SEQ ID NO: 2534 - DNA, 16 bp, synthetic construct
  misc_feature 1..16: note = Description of Artificial Sequence: Syntheticoligonucleotide
  source 1..16: mol_type = other DNA
gttatgtggcaccctg

SEQ ID NO: 2535 - DNA, 16 bp, synthetic construct
  misc_feature 1..16: note = Description of Artificial Sequence: Syntheticoligonucleotide
  source 1..16: mol_type = other DNA
gtggaatcccacaaaa

SEQ ID NO: 2536 - DNA, 16 bp, synthetic construct
  misc_feature 1..16: note = Description of Artificial Sequence: Syntheticoligonucleotide
  source 1..16: mol_type = other DNA
caggattaggagcttg

SEQ ID NO: 2537 - DNA, 16 bp, synthetic construct
  misc_feature 1..16: note = Description of Artificial Sequence: Syntheticoligonucleotide
  source 1..16: mol_type = other DNA
gcccgacactcgagac

SEQ ID NO: 2538 - DNA, 16 bp, synthetic construct
  misc_feature 1..16: note = Description of Artificial Sequence: Syntheticoligonucleotide
  source 1..16: mol_type = other DNA
ctggaattacttagca

SEQ ID NO: 2539 - DNA, 16 bp, synthetic construct
  misc_feature 1..16: note = Description of Artificial Sequence: Syntheticoligonucleotide
  source 1..16: mol_type = other DNA
agtggataggtgagct

SEQ ID NO: 2540 - DNA, 16 bp, synthetic construct
  misc_feature 1..16: note = Description of Artificial Sequence: Syntheticoligonucleotide
  source 1..16: mol_type = other DNA
aagaagcggagtaact

SEQ ID NO: 2541 - DNA, 16 bp, synthetic construct
  misc_feature 1..16: note = Description of Artificial Sequence: Syntheticoligonucleotide
  source 1..16: mol_type = other DNA
ccacgggcacaggtac

SEQ ID NO: 2542 - DNA, 16 bp, synthetic construct
  misc_feature 1..16: note = Description of Artificial Sequence: Syntheticoligonucleotide
  source 1..16: mol_type = other DNA
acctcctagctagctc

SEQ ID NO: 2543 - DNA, 16 bp, synthetic construct
  misc_feature 1..16: note = Description of Artificial Sequence: Syntheticoligonucleotide
  source 1..16: mol_type = other DNA
tggaggaacccactct

SEQ ID NO: 2544 - DNA, 16 bp, synthetic construct
  misc_feature 1..16: note = Description of Artificial Sequence: Syntheticoligonucleotide
  source 1..16: mol_type = other DNA
ggagagggttaggtat

SEQ ID NO: 2545 - DNA, 16 bp, synthetic construct
  misc_feature 1..16: note = Description of Artificial Sequence: Syntheticoligonucleotide
  source 1..16: mol_type = other DNA
ttacaaggaaaggttg

SEQ ID NO: 2546 - DNA, 16 bp, synthetic construct
  misc_feature 1..16: note = Description of Artificial Sequence: Syntheticoligonucleotide
  source 1..16: mol_type = other DNA
gcgatgatgattgcag

SEQ ID NO: 2547 - DNA, 16 bp, synthetic construct
  misc_feature 1..16: note = Description of Artificial Sequence: Syntheticoligonucleotide
  source 1..16: mol_type = other DNA
tatcgagtatcttacg

SEQ ID NO: 2548 - DNA, 16 bp, synthetic construct
  misc_feature 1..16: note = Description of Artificial Sequence: Syntheticoligonucleotide
  source 1..16: mol_type = other DNA
gtgaggtgaaaggtct

SEQ ID NO: 2549 - DNA, 16 bp, synthetic construct
  misc_feature 1..16: note = Description of Artificial Sequence: Syntheticoligonucleotide
  source 1..16: mol_type = other DNA
accccgagccatctga

SEQ ID NO: 2550 - DNA, 16 bp, synthetic construct
  misc_feature 1..16: note = Description of Artificial Sequence: Syntheticoligonucleotide
  source 1..16: mol_type = other DNA
cttgtgggaaactgtc

SEQ ID NO: 2551 - DNA, 16 bp, synthetic construct
  misc_feature 1..16: note = Description of Artificial Sequence: Syntheticoligonucleotide
  source 1..16: mol_type = other DNA
cgggcccccagcaggt

SEQ ID NO: 2552 - DNA, 16 bp, synthetic construct
  misc_feature 1..16: note = Description of Artificial Sequence: Syntheticoligonucleotide
  source 1..16: mol_type = other DNA
agctgcgatggtggca

SEQ ID NO: 2553 - DNA, 16 bp, synthetic construct
  misc_feature 1..16: note = Description of Artificial Sequence: Syntheticoligonucleotide
  source 1..16: mol_type = other DNA
tgtgaggctgatcatg

SEQ ID NO: 2554 - DNA, 16 bp, synthetic construct
  misc_feature 1..16: note = Description of Artificial Sequence: Syntheticoligonucleotide
  source 1..16: mol_type = other DNA
gggcacagccgaaagg

SEQ ID NO: 2555 - DNA, 16 bp, synthetic construct
  misc_feature 1..16: note = Description of Artificial Sequence: Syntheticoligonucleotide
  source 1..16: mol_type = other DNA
tccagaagatggtccg

SEQ ID NO: 2556 - DNA, 16 bp, synthetic construct
  misc_feature 1..16: note = Description of Artificial Sequence: Syntheticoligonucleotide
  source 1..16: mol_type = other DNA
gcagctacgatgcagc

SEQ ID NO: 2557 - DNA, 16 bp, synthetic construct
  misc_feature 1..16: note = Description of Artificial Sequence: Syntheticoligonucleotide
  source 1..16: mol_type = other DNA
ggaacttgaagtagtc

SEQ ID NO: 2558 - DNA, 16 bp, synthetic construct
  misc_feature 1..16: note = Description of Artificial Sequence: Syntheticoligonucleotide
  source 1..16: mol_type = other DNA
ttgcggaactccagct

SEQ ID NO: 2559 - DNA, 16 bp, synthetic construct
  misc_feature 1..16: note = Description of Artificial Sequence: Syntheticoligonucleotide
  source 1..16: mol_type = other DNA
cctgtgggcacatcca

SEQ ID NO: 2560 - DNA, 16 bp, synthetic construct
  misc_feature 1..16: note = Description of Artificial Sequence: Syntheticoligonucleotide
  source 1..16: mol_type = other DNA
agccctgaagtaatct

SEQ ID NO: 2561 - DNA, 16 bp, synthetic construct
  misc_feature 1..16: note = Description of Artificial Sequence: Syntheticoligonucleotide
  source 1..16: mol_type = other DNA
gtgtgattgtgtgatg

SEQ ID NO: 2562 - DNA, 16 bp, synthetic construct
  misc_feature 1..16: note = Description of Artificial Sequence: Syntheticoligonucleotide
  source 1..16: mol_type = other DNA
gcacgggactcaagag

SEQ ID NO: 2563 - DNA, 16 bp, synthetic construct
  misc_feature 1..16: note = Description of Artificial Sequence: Syntheticoligonucleotide
  source 1..16: mol_type = other DNA
ggagctcggctgcagt

SEQ ID NO: 2564 - DNA, 16 bp, synthetic construct
  misc_feature 1..16: note = Description of Artificial Sequence: Syntheticoligonucleotide
  source 1..16: mol_type = other DNA
ccatcccagtcaccgc

SEQ ID NO: 2565 - DNA, 16 bp, synthetic construct
  misc_feature 1..16: note = Description of Artificial Sequence: Syntheticoligonucleotide
  source 1..16: mol_type = other DNA
tcaacctctgaggcca

SEQ ID NO: 2566 - DNA, 16 bp, synthetic construct
  misc_feature 1..16: note = Description of Artificial Sequence: Syntheticoligonucleotide
  source 1..16: mol_type = other DNA
gctggaatcacggtag

SEQ ID NO: 2567 - DNA, 16 bp, synthetic construct
  misc_feature 1..16: note = Description of Artificial Sequence: Syntheticoligonucleotide
  source 1..16: mol_type = other DNA
aagttgttcaaagctc

SEQ ID NO: 2568 - DNA, 16 bp, synthetic construct
  misc_feature 1..16: note = Description of Artificial Sequence: Syntheticoligonucleotide
  source 1..16: mol_type = other DNA
gtcaagatggaggaga

SEQ ID NO: 2569 - DNA, 16 bp, synthetic construct
  misc_feature 1..16: note = Description of Artificial Sequence: Syntheticoligonucleotide
  source 1..16: mol_type = other DNA
gtaaaggtcctcggcg

SEQ ID NO: 2570 - DNA, 16 bp, synthetic construct
  misc_feature 1..16: note = Description of Artificial Sequence: Syntheticoligonucleotide
  source 1..16: mol_type = other DNA
gcgatacaagcaaagt

SEQ ID NO: 2571 - DNA, 16 bp, synthetic construct
  misc_feature 1..16: note = Description of Artificial Sequence: Syntheticoligonucleotide
  source 1..16: mol_type = other DNA
tcctgaatatggactc

SEQ ID NO: 2572 - DNA, 16 bp, synthetic construct
  misc_feature 1..16: note = Description of Artificial Sequence: Syntheticoligonucleotide
  source 1..16: mol_type = other DNA
ggtcaaatcaatcaaa

SEQ ID NO: 2573 - DNA, 16 bp, synthetic construct
  misc_feature 1..16: note = Description of Artificial Sequence: Syntheticoligonucleotide
  source 1..16: mol_type = other DNA
gaattagcagagaggg

SEQ ID NO: 2574 - DNA, 16 bp, synthetic construct
  misc_feature 1..16: note = Description of Artificial Sequence: Syntheticoligonucleotide
  source 1..16: mol_type = other DNA
taggagtaaggacatg

SEQ ID NO: 2575 - DNA, 16 bp, synthetic construct
  misc_feature 1..16: note = Description of Artificial Sequence: Syntheticoligonucleotide
  source 1..16: mol_type = other DNA
atgtaatggctgatga

SEQ ID NO: 2576 - DNA, 16 bp, synthetic construct
  misc_feature 1..16: note = Description of Artificial Sequence: Syntheticoligonucleotide
  source 1..16: mol_type = other DNA
gagactagaagccaac

SEQ ID NO: 2577 - DNA, 16 bp, synthetic construct
  misc_feature 1..16: note = Description of Artificial Sequence: Syntheticoligonucleotide
  source 1..16: mol_type = other DNA
gactcctgaggaaggt

SEQ ID NO: 2578 - DNA, 16 bp, synthetic construct
  misc_feature 1..16: note = Description of Artificial Sequence: Syntheticoligonucleotide
  source 1..16: mol_type = other DNA
gtccattatcccaaca

SEQ ID NO: 2579 - DNA, 16 bp, synthetic construct
  misc_feature 1..16: note = Description of Artificial Sequence: Syntheticoligonucleotide
  source 1..16: mol_type = other DNA
cttggacatggaccca

SEQ ID NO: 2580 - DNA, 16 bp, synthetic construct
  misc_feature 1..16: note = Description of Artificial Sequence: Syntheticoligonucleotide
  source 1..16: mol_type = other DNA
gaggaggattgcctca

SEQ ID NO: 2581 - DNA, 16 bp, synthetic construct
  misc_feature 1..16: note = Description of Artificial Sequence: Syntheticoligonucleotide
  source 1..16: mol_type = other DNA
cagggcttcaagttga

SEQ ID NO: 2582 - DNA, 16 bp, synthetic construct
  misc_feature 1..16: note = Description of Artificial Sequence: Syntheticoligonucleotide
  source 1..16: mol_type = other DNA
atctaggcttggattt

SEQ ID NO: 2583 - DNA, 16 bp, synthetic construct
  misc_feature 1..16: note = Description of Artificial Sequence: Syntheticoligonucleotide
  source 1..16: mol_type = other DNA
cacgctctggccaact

SEQ ID NO: 2584 - DNA, 16 bp, synthetic construct
  misc_feature 1..16: note = Description of Artificial Sequence: Syntheticoligonucleotide
  source 1..16: mol_type = other DNA
aatacatggccactcc

SEQ ID NO: 2585 - DNA, 16 bp, synthetic construct
  misc_feature 1..16: note = Description of Artificial Sequence: Syntheticoligonucleotide
  source 1..16: mol_type = other DNA
atttaaaggatcctag

SEQ ID NO: 2586 - DNA, 16 bp, synthetic construct
  misc_feature 1..16: note = Description of Artificial Sequence: Syntheticoligonucleotide
  source 1..16: mol_type = other DNA
cttcttgggttgtgga

SEQ ID NO: 2587 - DNA, 16 bp, synthetic construct
  misc_feature 1..16: note = Description of Artificial Sequence: Syntheticoligonucleotide
  source 1..16: mol_type = other DNA
ttcatcgacaccacgg

SEQ ID NO: 2588 - DNA, 16 bp, synthetic construct
  misc_feature 1..16: note = Description of Artificial Sequence: Syntheticoligonucleotide
  source 1..16: mol_type = other DNA
tcagaagctgaatggg

SEQ ID NO: 2589 - DNA, 16 bp, synthetic construct
  misc_feature 1..16: note = Description of Artificial Sequence: Syntheticoligonucleotide
  source 1..16: mol_type = other DNA
gctaagaattctcccc

SEQ ID NO: 2590 - DNA, 16 bp, synthetic construct
  misc_feature 1..16: note = Description of Artificial Sequence: Syntheticoligonucleotide
  source 1..16: mol_type = other DNA
gcactggtgagatgag

SEQ ID NO: 2591 - DNA, 16 bp, synthetic construct
  misc_feature 1..16: note = Description of Artificial Sequence: Syntheticoligonucleotide
  source 1..16: mol_type = other DNA
tgagggagatgagtgt

SEQ ID NO: 2592 - DNA, 16 bp, synthetic construct
  misc_feature 1..16: note = Description of Artificial Sequence: Syntheticoligonucleotide
  source 1..16: mol_type = other DNA
ctcagatgccgagttc

SEQ ID NO: 2593 - DNA, 16 bp, synthetic construct
  misc_feature 1..16: note = Description of Artificial Sequence: Syntheticoligonucleotide
  source 1..16: mol_type = other DNA
ccacgcaagacctgct

SEQ ID NO: 2594 - DNA, 16 bp, synthetic construct
  misc_feature 1..16: note = Description of Artificial Sequence: Syntheticoligonucleotide
  source 1..16: mol_type = other DNA
aggcgagtccaggagt

SEQ ID NO: 2595 - DNA, 16 bp, synthetic construct
  misc_feature 1..16: note = Description of Artificial Sequence: Syntheticoligonucleotide
  source 1..16: mol_type = other DNA
gaccgagctgacatta

SEQ ID NO: 2596 - DNA, 16 bp, synthetic construct
  misc_feature 1..16: note = Description of Artificial Sequence: Syntheticoligonucleotide
  source 1..16: mol_type = other DNA
ggtagattctgagact

SEQ ID NO: 2597 - DNA, 16 bp, synthetic construct
  misc_feature 1..16: note = Description of Artificial Sequence: Syntheticoligonucleotide
  source 1..16: mol_type = other DNA
agtcctattttgcccc

SEQ ID NO: 2598 - DNA, 16 bp, synthetic construct
  misc_feature 1..16: note = Description of Artificial Sequence: Syntheticoligonucleotide
  source 1..16: mol_type = other DNA
cacgctagcacagccc

SEQ ID NO: 2599 - DNA, 16 bp, synthetic construct
  misc_feature 1..16: note = Description of Artificial Sequence: Syntheticoligonucleotide
  source 1..16: mol_type = other DNA
gggaaaggagtcacac

SEQ ID NO: 2600 - DNA, 16 bp, synthetic construct
  misc_feature 1..16: note = Description of Artificial Sequence: Syntheticoligonucleotide
  source 1..16: mol_type = other DNA
cctgagacagggattg

SEQ ID NO: 2601 - DNA, 16 bp, synthetic construct
  misc_feature 1..16: note = Description of Artificial Sequence: Syntheticoligonucleotide
  source 1..16: mol_type = other DNA
aagcccacatggtaga

SEQ ID NO: 2602 - DNA, 16 bp, synthetic construct
  misc_feature 1..16: note = Description of Artificial Sequence: Syntheticoligonucleotide
  source 1..16: mol_type = other DNA
ggtgttaccaggtggg

SEQ ID NO: 2603 - DNA, 16 bp, synthetic construct
  misc_feature 1..16: note = Description of Artificial Sequence: Syntheticoligonucleotide
  source 1..16: mol_type = other DNA
ctttaaggttctgcac

SEQ ID NO: 2604 - DNA, 16 bp, synthetic construct
  misc_feature 1..16: note = Description of Artificial Sequence: Syntheticoligonucleotide
  source 1..16: mol_type = other DNA
taaagacggccattcg

SEQ ID NO: 2605 - DNA, 16 bp, synthetic construct
  misc_feature 1..16: note = Description of Artificial Sequence: Syntheticoligonucleotide
  source 1..16: mol_type = other DNA
accctagacctctccc

SEQ ID NO: 2606 - DNA, 16 bp, synthetic construct
  misc_feature 1..16: note = Description of Artificial Sequence: Syntheticoligonucleotide
  source 1..16: mol_type = other DNA
attctagagcctggct

SEQ ID NO: 2607 - DNA, 16 bp, synthetic construct
  misc_feature 1..16: note = Description of Artificial Sequence: Syntheticoligonucleotide
  source 1..16: mol_type = other DNA
gccatctagaggagct

SEQ ID NO: 2608 - DNA, 16 bp, synthetic construct
  misc_feature 1..16: note = Description of Artificial Sequence: Syntheticoligonucleotide
  source 1..16: mol_type = other DNA
ctaagtagggagaaga

SEQ ID NO: 2609 - DNA, 16 bp, synthetic construct
  misc_feature 1..16: note = Description of Artificial Sequence: Syntheticoligonucleotide
  source 1..16: mol_type = other DNA
tcctttataccagccc

SEQ ID NO: 2610 - DNA, 16 bp, synthetic construct
  misc_feature 1..16: note = Description of Artificial Sequence: Syntheticoligonucleotide
  source 1..16: mol_type = other DNA
ctgggcatgtttggag

SEQ ID NO: 2611 - DNA, 16 bp, synthetic construct
  misc_feature 1..16: note = Description of Artificial Sequence: Syntheticoligonucleotide
  source 1..16: mol_type = other DNA
tggttatgtggcaccc

SEQ ID NO: 2612 - DNA, 16 bp, synthetic construct
  misc_feature 1..16: note = Description of Artificial Sequence: Syntheticoligonucleotide
  source 1..16: mol_type = other DNA
tctgaggtggaatccc

SEQ ID NO: 2613 - DNA, 16 bp, synthetic construct
  misc_feature 1..16: note = Description of Artificial Sequence: Syntheticoligonucleotide
  source 1..16: mol_type = other DNA
tcaggattaggagctt

SEQ ID NO: 2614 - DNA, 16 bp, synthetic construct
  misc_feature 1..16: note = Description of Artificial Sequence: Syntheticoligonucleotide
  source 1..16: mol_type = other DNA
ccccaagggagtcagg

SEQ ID NO: 2615 - DNA, 16 bp, synthetic construct
  misc_feature 1..16: note = Description of Artificial Sequence: Syntheticoligonucleotide
  source 1..16: mol_type = other DNA
cctggaattacttagc

SEQ ID NO: 2616 - DNA, 16 bp, synthetic construct
  misc_feature 1..16: note = Description of Artificial Sequence: Syntheticoligonucleotide
  source 1..16: mol_type = other DNA
cagtggataggtgagc

SEQ ID NO: 2617 - DNA, 16 bp, synthetic construct
  misc_feature 1..16: note = Description of Artificial Sequence: Syntheticoligonucleotide
  source 1..16: mol_type = other DNA
aaagaagcggagtaac

SEQ ID NO: 2618 - DNA, 16 bp, synthetic construct
  misc_feature 1..16: note = Description of Artificial Sequence: Syntheticoligonucleotide
  source 1..16: mol_type = other DNA
tccacgggcacaggta

SEQ ID NO: 2619 - DNA, 16 bp, synthetic construct
  misc_feature 1..16: note = Description of Artificial Sequence: Syntheticoligonucleotide
  source 1..16: mol_type = other DNA
ggacctcctagctagc

SEQ ID NO: 2620 - DNA, 16 bp, synthetic construct
  misc_feature 1..16: note = Description of Artificial Sequence: Syntheticoligonucleotide
  source 1..16: mol_type = other DNA
atggaggaacccactc

SEQ ID NO: 2621 - DNA, 16 bp, synthetic construct
  misc_feature 1..16: note = Description of Artificial Sequence: Syntheticoligonucleotide
  source 1..16: mol_type = other DNA
aggagagggttaggta

SEQ ID NO: 2622 - DNA, 16 bp, synthetic construct
  misc_feature 1..16: note = Description of Artificial Sequence: Syntheticoligonucleotide
  source 1..16: mol_type = other DNA
gtgttacaaggaaagg

SEQ ID NO: 2623 - DNA, 16 bp, synthetic construct
  misc_feature 1..16: note = Description of Artificial Sequence: Syntheticoligonucleotide
  source 1..16: mol_type = other DNA
cagcgatgatgattgc

SEQ ID NO: 2624 - DNA, 16 bp, synthetic construct
  misc_feature 1..16: note = Description of Artificial Sequence: Syntheticoligonucleotide
  source 1..16: mol_type = other DNA
ttatcgagtatcttac

SEQ ID NO: 2625 - DNA, 16 bp, synthetic construct
  misc_feature 1..16: note = Description of Artificial Sequence: Syntheticoligonucleotide
  source 1..16: mol_type = other DNA
agtgaggtgaaaggtc

SEQ ID NO: 2626 - DNA, 16 bp, synthetic construct
  misc_feature 1..16: note = Description of Artificial Sequence: Syntheticoligonucleotide
  source 1..16: mol_type = other DNA
cctaccccgagccatc

SEQ ID NO: 2627 - DNA, 16 bp, synthetic construct
  misc_feature 1..16: note = Description of Artificial Sequence: Syntheticoligonucleotide
  source 1..16: mol_type = other DNA
gcttgtgggaaactgt

SEQ ID NO: 2628 - DNA, 16 bp, synthetic construct
  misc_feature 1..16: note = Description of Artificial Sequence: Syntheticoligonucleotide
  source 1..16: mol_type = other DNA
tccccctgggccccgg

SEQ ID NO: 2629 - DNA, 16 bp, synthetic construct
  misc_feature 1..16: note = Description of Artificial Sequence: Syntheticoligonucleotide
  source 1..16: mol_type = other DNA
gccaccatgactaggg

SEQ ID NO: 2630 - DNA, 16 bp, synthetic construct
  misc_feature 1..16: note = Description of Artificial Sequence: Syntheticoligonucleotide
  source 1..16: mol_type = other DNA
cggtggtgggtggtgt

SEQ ID NO: 2631 - DNA, 16 bp, synthetic construct
  misc_feature 1..16: note = Description of Artificial Sequence: Syntheticoligonucleotide
  source 1..16: mol_type = other DNA
gtgggtaggagctctg

SEQ ID NO: 2632 - DNA, 16 bp, synthetic construct
  misc_feature 1..16: note = Description of Artificial Sequence: Syntheticoligonucleotide
  source 1..16: mol_type = other DNA
atccagaagatggtcc

SEQ ID NO: 2633 - DNA, 16 bp, synthetic construct
  misc_feature 1..16: note = Description of Artificial Sequence: Syntheticoligonucleotide
  source 1..16: mol_type = other DNA
cagcagctacgatgca

SEQ ID NO: 2634 - DNA, 16 bp, synthetic construct
  misc_feature 1..16: note = Description of Artificial Sequence: Syntheticoligonucleotide
  source 1..16: mol_type = other DNA
gtggaacttgaagtag

SEQ ID NO: 2635 - DNA, 16 bp, synthetic construct
  misc_feature 1..16: note = Description of Artificial Sequence: Syntheticoligonucleotide
  source 1..16: mol_type = other DNA
cttgcggaactccagc

SEQ ID NO: 2636 - DNA, 16 bp, synthetic construct
  misc_feature 1..16: note = Description of Artificial Sequence: Syntheticoligonucleotide
  source 1..16: mol_type = other DNA
ccctgtgggcacatcc

SEQ ID NO: 2637 - DNA, 16 bp, synthetic construct
  misc_feature 1..16: note = Description of Artificial Sequence: Syntheticoligonucleotide
  source 1..16: mol_type = other DNA
cagccctgaagtaatc

SEQ ID NO: 2638 - DNA, 16 bp, synthetic construct
  misc_feature 1..16: note = Description of Artificial Sequence: Syntheticoligonucleotide
  source 1..16: mol_type = other DNA
cctgtgttgacagtgc

SEQ ID NO: 2639 - DNA, 16 bp, synthetic construct
  misc_feature 1..16: note = Description of Artificial Sequence: Syntheticoligonucleotide
  source 1..16: mol_type = other DNA
tgcacgggactcaaga

SEQ ID NO: 2640 - DNA, 16 bp, synthetic construct
  misc_feature 1..16: note = Description of Artificial Sequence: Syntheticoligonucleotide
  source 1..16: mol_type = other DNA
cacttgaggccatccc

SEQ ID NO: 2641 - DNA, 16 bp, synthetic construct
  misc_feature 1..16: note = Description of Artificial Sequence: Syntheticoligonucleotide
  source 1..16: mol_type = other DNA
gtcaacctctgaggcc

SEQ ID NO: 2642 - DNA, 16 bp, synthetic construct
  misc_feature 1..16: note = Description of Artificial Sequence: Syntheticoligonucleotide
  source 1..16: mol_type = other DNA
tggctggaatcacggt

SEQ ID NO: 2643 - DNA, 16 bp, synthetic construct
  misc_feature 1..16: note = Description of Artificial Sequence: Syntheticoligonucleotide
  source 1..16: mol_type = other DNA
caagttgttcaaagct

SEQ ID NO: 2644 - DNA, 16 bp, synthetic construct
  misc_feature 1..16: note = Description of Artificial Sequence: Syntheticoligonucleotide
  source 1..16: mol_type = other DNA
ggtcaagatggaggag

SEQ ID NO: 2645 - DNA, 16 bp, synthetic construct
  misc_feature 1..16: note = Description of Artificial Sequence: Syntheticoligonucleotide
  source 1..16: mol_type = other DNA
tgtaaaggtcctcggc

SEQ ID NO: 2646 - DNA, 16 bp, synthetic construct
  misc_feature 1..16: note = Description of Artificial Sequence: Syntheticoligonucleotide
  source 1..16: mol_type = other DNA
agcgatacaagcaaag

SEQ ID NO: 2647 - DNA, 16 bp, synthetic construct
  misc_feature 1..16: note = Description of Artificial Sequence: Syntheticoligonucleotide
  source 1..16: mol_type = other DNA
gaacaacctgtttgct

SEQ ID NO: 2648 - DNA, 16 bp, synthetic construct
  misc_feature 1..16: note = Description of Artificial Sequence: Syntheticoligonucleotide
  source 1..16: mol_type = other DNA
cacttggtcaaatcaa

SEQ ID NO: 2649 - DNA, 16 bp, synthetic construct
  misc_feature 1..16: note = Description of Artificial Sequence: Syntheticoligonucleotide
  source 1..16: mol_type = other DNA
gagaattagcagagag

SEQ ID NO: 2650 - DNA, 16 bp, synthetic construct
  misc_feature 1..16: note = Description of Artificial Sequence: Syntheticoligonucleotide
  source 1..16: mol_type = other DNA
attaggagtaaggaca

SEQ ID NO: 2651 - DNA, 16 bp, synthetic construct
  misc_feature 1..16: note = Description of Artificial Sequence: Syntheticoligonucleotide
  source 1..16: mol_type = other DNA
tatgtaatggctgatg

SEQ ID NO: 2652 - DNA, 16 bp, synthetic construct
  misc_feature 1..16: note = Description of Artificial Sequence: Syntheticoligonucleotide
  source 1..16: mol_type = other DNA
ccataaaagagactag

SEQ ID NO: 2653 - DNA, 16 bp, synthetic construct
  misc_feature 1..16: note = Description of Artificial Sequence: Syntheticoligonucleotide
  source 1..16: mol_type = other DNA
caaagactcctgagga

SEQ ID NO: 2654 - DNA, 16 bp, synthetic construct
  misc_feature 1..16: note = Description of Artificial Sequence: Syntheticoligonucleotide
  source 1..16: mol_type = other DNA
agtccattatcccaac

SEQ ID NO: 2655 - DNA, 16 bp, synthetic construct
  misc_feature 1..16: note = Description of Artificial Sequence: Syntheticoligonucleotide
  source 1..16: mol_type = other DNA
agcttggacatggacc

SEQ ID NO: 2656 - DNA, 16 bp, synthetic construct
  misc_feature 1..16: note = Description of Artificial Sequence: Syntheticoligonucleotide
  source 1..16: mol_type = other DNA
agaggaggattgcctc

SEQ ID NO: 2657 - DNA, 16 bp, synthetic construct
  misc_feature 1..16: note = Description of Artificial Sequence: Syntheticoligonucleotide
  source 1..16: mol_type = other DNA
tgcagggcttcaagtt

SEQ ID NO: 2658 - DNA, 16 bp, synthetic construct
  misc_feature 1..16: note = Description of Artificial Sequence: Syntheticoligonucleotide
  source 1..16: mol_type = other DNA
gatctaggcttggatt

SEQ ID NO: 2659 - DNA, 16 bp, synthetic construct
  misc_feature 1..16: note = Description of Artificial Sequence: Syntheticoligonucleotide
  source 1..16: mol_type = other DNA
ccacgctctggccaac

SEQ ID NO: 2660 - DNA, 16 bp, synthetic construct
  misc_feature 1..16: note = Description of Artificial Sequence: Syntheticoligonucleotide
  source 1..16: mol_type = other DNA
aaatacatggccactc

SEQ ID NO: 2661 - DNA, 16 bp, synthetic construct
  misc_feature 1..16: note = Description of Artificial Sequence: Syntheticoligonucleotide
  source 1..16: mol_type = other DNA
gatttaaaggatccta

SEQ ID NO: 2662 - DNA, 16 bp, synthetic construct
  misc_feature 1..16: note = Description of Artificial Sequence: Syntheticoligonucleotide
  source 1..16: mol_type = other DNA
cccttcttgggttgtg

SEQ ID NO: 2663 - DNA, 16 bp, synthetic construct
  misc_feature 1..16: note = Description of Artificial Sequence: Syntheticoligonucleotide
  source 1..16: mol_type = other DNA
cttcatcgacaccacg

SEQ ID NO: 2664 - DNA, 16 bp, synthetic construct
  misc_feature 1..16: note = Description of Artificial Sequence: Syntheticoligonucleotide
  source 1..16: mol_type = other DNA
ctgactgggtttctca

SEQ ID NO: 2665 - DNA, 16 bp, synthetic construct
  misc_feature 1..16: note = Description of Artificial Sequence: Syntheticoligonucleotide
  source 1..16: mol_type = other DNA
agctaagaattctccc

SEQ ID NO: 2666 - DNA, 16 bp, synthetic construct
  misc_feature 1..16: note = Description of Artificial Sequence: Syntheticoligonucleotide
  source 1..16: mol_type = other DNA
agcactggtgagatga

SEQ ID NO: 2667 - DNA, 16 bp, synthetic construct
  misc_feature 1..16: note = Description of Artificial Sequence: Syntheticoligonucleotide
  source 1..16: mol_type = other DNA
gagcagttgctccttc

SEQ ID NO: 2668 - DNA, 16 bp, synthetic construct
  misc_feature 1..16: note = Description of Artificial Sequence: Syntheticoligonucleotide
  source 1..16: mol_type = other DNA
gctcagatgccgagtt

SEQ ID NO: 2669 - DNA, 16 bp, synthetic construct
  misc_feature 1..16: note = Description of Artificial Sequence: Syntheticoligonucleotide
  source 1..16: mol_type = other DNA
agccacgcaagacctg

SEQ ID NO: 2670 - DNA, 16 bp, synthetic construct
  misc_feature 1..16: note = Description of Artificial Sequence: Syntheticoligonucleotide
  source 1..16: mol_type = other DNA
gaggcgagtccaggag

SEQ ID NO: 2671 - DNA, 16 bp, synthetic construct
  misc_feature 1..16: note = Description of Artificial Sequence: Syntheticoligonucleotide
  source 1..16: mol_type = other DNA
ggaccgagctgacatt

SEQ ID NO: 2672 - DNA, 16 bp, synthetic construct
  misc_feature 1..16: note = Description of Artificial Sequence: Syntheticoligonucleotide
  source 1..16: mol_type = other DNA
agtgggtagattctga

SEQ ID NO: 2673 - DNA, 16 bp, synthetic construct
  misc_feature 1..16: note = Description of Artificial Sequence: Syntheticoligonucleotide
  source 1..16: mol_type = other DNA
gagtcctattttgccc

SEQ ID NO: 2674 - DNA, 16 bp, synthetic construct
  misc_feature 1..16: note = Description of Artificial Sequence: Syntheticoligonucleotide
  source 1..16: mol_type = other DNA
ccacgctagcacagcc

SEQ ID NO: 2675 - DNA, 16 bp, synthetic construct
  misc_feature 1..16: note = Description of Artificial Sequence: Syntheticoligonucleotide
  source 1..16: mol_type = other DNA
ggtaccccaccctgcc

SEQ ID NO: 2676 - DNA, 16 bp, synthetic construct
  misc_feature 1..16: note = Description of Artificial Sequence: Syntheticoligonucleotide
  source 1..16: mol_type = other DNA
aatacggcctcctcct

SEQ ID NO: 2677 - DNA, 16 bp, synthetic construct
  misc_feature 1..16: note = Description of Artificial Sequence: Syntheticoligonucleotide
  source 1..16: mol_type = other DNA
caagcccacatggtag

SEQ ID NO: 2678 - DNA, 16 bp, synthetic construct
  misc_feature 1..16: note = Description of Artificial Sequence: Syntheticoligonucleotide
  source 1..16: mol_type = other DNA
aggtgttaccaggtgg

SEQ ID NO: 2679 - DNA, 16 bp, synthetic construct
  misc_feature 1..16: note = Description of Artificial Sequence: Syntheticoligonucleotide
  source 1..16: mol_type = other DNA
gcatctttaaggttct

SEQ ID NO: 2680 - DNA, 16 bp, synthetic construct
  misc_feature 1..16: note = Description of Artificial Sequence: Syntheticoligonucleotide
  source 1..16: mol_type = other DNA
ttaaagacggccattc

SEQ ID NO: 2681 - DNA, 16 bp, synthetic construct
  misc_feature 1..16: note = Description of Artificial Sequence: Syntheticoligonucleotide
  source 1..16: mol_type = other DNA
ttattgggatgaagcc

SEQ ID NO: 2682 - DNA, 16 bp, synthetic construct
  misc_feature 1..16: note = Description of Artificial Sequence: Syntheticoligonucleotide
  source 1..16: mol_type = other DNA
gggcaaagcaggagtg

SEQ ID NO: 2683 - DNA, 16 bp, synthetic construct
  misc_feature 1..16: note = Description of Artificial Sequence: Syntheticoligonucleotide
  source 1..16: mol_type = other DNA
agccatctagaggagc

SEQ ID NO: 2684 - DNA, 16 bp, synthetic construct
  misc_feature 1..16: note = Description of Artificial Sequence: Syntheticoligonucleotide
  source 1..16: mol_type = other DNA
cctaagtagggagaag

SEQ ID NO: 2685 - DNA, 16 bp, synthetic construct
  misc_feature 1..16: note = Description of Artificial Sequence: Syntheticoligonucleotide
  source 1..16: mol_type = other DNA
ttccctgggagtgccc

SEQ ID NO: 2686 - DNA, 16 bp, synthetic construct
  misc_feature 1..16: note = Description of Artificial Sequence: Syntheticoligonucleotide
  source 1..16: mol_type = other DNA
aggtctgggcatgttt

SEQ ID NO: 2687 - DNA, 16 bp, synthetic construct
  misc_feature 1..16: note = Description of Artificial Sequence: Syntheticoligonucleotide
  source 1..16: mol_type = other DNA
gtggttatgtggcacc

SEQ ID NO: 2688 - DNA, 16 bp, synthetic construct
  misc_feature 1..16: note = Description of Artificial Sequence: Syntheticoligonucleotide
  source 1..16: mol_type = other DNA
gccctcttctaaattc

SEQ ID NO: 2689 - DNA, 16 bp, synthetic construct
  misc_feature 1..16: note = Description of Artificial Sequence: Syntheticoligonucleotide
  source 1..16: mol_type = other DNA
tgtcaggattaggagc

SEQ ID NO: 2690 - DNA, 16 bp, synthetic construct
  misc_feature 1..16: note = Description of Artificial Sequence: Syntheticoligonucleotide
  source 1..16: mol_type = other DNA
cccaatccccaaggga

SEQ ID NO: 2691 - DNA, 16 bp, synthetic construct
  misc_feature 1..16: note = Description of Artificial Sequence: Syntheticoligonucleotide
  source 1..16: mol_type = other DNA
tcctggaattacttag

SEQ ID NO: 2692 - DNA, 16 bp, synthetic construct
  misc_feature 1..16: note = Description of Artificial Sequence: Syntheticoligonucleotide
  source 1..16: mol_type = other DNA
gcagtggataggtgag

SEQ ID NO: 2693 - DNA, 16 bp, synthetic construct
  misc_feature 1..16: note = Description of Artificial Sequence: Syntheticoligonucleotide
  source 1..16: mol_type = other DNA
aaaagaagcggagtaa

SEQ ID NO: 2694 - DNA, 16 bp, synthetic construct
  misc_feature 1..16: note = Description of Artificial Sequence: Syntheticoligonucleotide
  source 1..16: mol_type = other DNA
gtccacgggcacaggt

SEQ ID NO: 2695 - DNA, 16 bp, synthetic construct
  misc_feature 1..16: note = Description of Artificial Sequence: Syntheticoligonucleotide
  source 1..16: mol_type = other DNA
aggacctcctagctag

SEQ ID NO: 2696 - DNA, 16 bp, synthetic construct
  misc_feature 1..16: note = Description of Artificial Sequence: Syntheticoligonucleotide
  source 1..16: mol_type = other DNA
aatggaggaacccact

SEQ ID NO: 2697 - DNA, 16 bp, synthetic construct
  misc_feature 1..16: note = Description of Artificial Sequence: Syntheticoligonucleotide
  source 1..16: mol_type = other DNA
caggagagggttaggt

SEQ ID NO: 2698 - DNA, 16 bp, synthetic construct
  misc_feature 1..16: note = Description of Artificial Sequence: Syntheticoligonucleotide
  source 1..16: mol_type = other DNA
caaatgggtgttacaa

SEQ ID NO: 2699 - DNA, 16 bp, synthetic construct
  misc_feature 1..16: note = Description of Artificial Sequence: Syntheticoligonucleotide
  source 1..16: mol_type = other DNA
tcagcgatgatgattg

SEQ ID NO: 2700 - DNA, 16 bp, synthetic construct
  misc_feature 1..16: note = Description of Artificial Sequence: Syntheticoligonucleotide
  source 1..16: mol_type = other DNA
attatcgagtatctta

SEQ ID NO: 2701 - DNA, 16 bp, synthetic construct
  misc_feature 1..16: note = Description of Artificial Sequence: Syntheticoligonucleotide
  source 1..16: mol_type = other DNA
gctagggctgaagtga

SEQ ID NO: 2702 - DNA, 16 bp, synthetic construct
  misc_feature 1..16: note = Description of Artificial Sequence: Syntheticoligonucleotide
  source 1..16: mol_type = other DNA
tatgacctaccccgag

SEQ ID NO: 2703 - DNA, 16 bp, synthetic construct
  misc_feature 1..16: note = Description of Artificial Sequence: Syntheticoligonucleotide
  source 1..16: mol_type = other DNA
tggcttgtgggaaact

SEQ ID NO: 2704 - DNA, 16 bp, synthetic construct
  misc_feature 1..16: note = Description of Artificial Sequence: Syntheticoligonucleotide
  source 1..16: mol_type = other DNA
ggaaggttccccctgg

SEQ ID NO: 2705 - DNA, 16 bp, synthetic construct
  misc_feature 1..16: note = Description of Artificial Sequence: Syntheticoligonucleotide
  source 1..16: mol_type = other DNA
cggagggtgccaccat

SEQ ID NO: 2706 - DNA, 16 bp, synthetic construct
  misc_feature 1..16: note = Description of Artificial Sequence: Syntheticoligonucleotide
  source 1..16: mol_type = other DNA
ccccagtggcggtggt

SEQ ID NO: 2707 - DNA, 16 bp, synthetic construct
  misc_feature 1..16: note = Description of Artificial Sequence: Syntheticoligonucleotide
  source 1..16: mol_type = other DNA
agtgggtaggagctct

SEQ ID NO: 2708 - DNA, 16 bp, synthetic construct
  misc_feature 1..16: note = Description of Artificial Sequence: Syntheticoligonucleotide
  source 1..16: mol_type = other DNA
gcccttctcatccaga

SEQ ID NO: 2709 - DNA, 16 bp, synthetic construct
  misc_feature 1..16: note = Description of Artificial Sequence: Syntheticoligonucleotide
  source 1..16: mol_type = other DNA
cgacagggccttggct

SEQ ID NO: 2710 - DNA, 16 bp, synthetic construct
  misc_feature 1..16: note = Description of Artificial Sequence: Syntheticoligonucleotide
  source 1..16: mol_type = other DNA
tgtggaacttgaagta

SEQ ID NO: 2711 - DNA, 16 bp, synthetic construct
  misc_feature 1..16: note = Description of Artificial Sequence: Syntheticoligonucleotide
  source 1..16: mol_type = other DNA
tttcttgcggaactcc

SEQ ID NO: 2712 - DNA, 16 bp, synthetic construct
  misc_feature 1..16: note = Description of Artificial Sequence: Syntheticoligonucleotide
  source 1..16: mol_type = other DNA
cctcacttcttggtcc

SEQ ID NO: 2713 - DNA, 16 bp, synthetic construct
  misc_feature 1..16: note = Description of Artificial Sequence: Syntheticoligonucleotide
  source 1..16: mol_type = other DNA
acaggattgtgacatt

SEQ ID NO: 2714 - DNA, 16 bp, synthetic construct
  misc_feature 1..16: note = Description of Artificial Sequence: Syntheticoligonucleotide
  source 1..16: mol_type = other DNA
cacacccctgtgttga

SEQ ID NO: 2715 - DNA, 16 bp, synthetic construct
  misc_feature 1..16: note = Description of Artificial Sequence: Syntheticoligonucleotide
  source 1..16: mol_type = other DNA
ctgcacgggactcaag

SEQ ID NO: 2716 - DNA, 16 bp, synthetic construct
  misc_feature 1..16: note = Description of Artificial Sequence: Syntheticoligonucleotide
  source 1..16: mol_type = other DNA
gcacttgaggccatcc

SEQ ID NO: 2717 - DNA, 16 bp, synthetic construct
  misc_feature 1..16: note = Description of Artificial Sequence: Syntheticoligonucleotide
  source 1..16: mol_type = other DNA
tctgtggaaggccggg

SEQ ID NO: 2718 - DNA, 16 bp, synthetic construct
  misc_feature 1..16: note = Description of Artificial Sequence: Syntheticoligonucleotide
  source 1..16: mol_type = other DNA
ctggctggaatcacgg

SEQ ID NO: 2719 - DNA, 16 bp, synthetic construct
  misc_feature 1..16: note = Description of Artificial Sequence: Syntheticoligonucleotide
  source 1..16: mol_type = other DNA
gcatttcaagttgttc

SEQ ID NO: 2720 - DNA, 16 bp, synthetic construct
  misc_feature 1..16: note = Description of Artificial Sequence: Syntheticoligonucleotide
  source 1..16: mol_type = other DNA
atcgatggagtgtggt

SEQ ID NO: 2721 - DNA, 16 bp, synthetic construct
  misc_feature 1..16: note = Description of Artificial Sequence: Syntheticoligonucleotide
  source 1..16: mol_type = other DNA
atgtaaaggtcctcgg

SEQ ID NO: 2722 - DNA, 16 bp, synthetic construct
  misc_feature 1..16: note = Description of Artificial Sequence: Syntheticoligonucleotide
  source 1..16: mol_type = other DNA
aagcgatacaagcaaa

SEQ ID NO: 2723 - DNA, 16 bp, synthetic construct
  misc_feature 1..16: note = Description of Artificial Sequence: Syntheticoligonucleotide
  source 1..16: mol_type = other DNA
ctgaacaacctgtttg

SEQ ID NO: 2724 - DNA, 16 bp, synthetic construct
  misc_feature 1..16: note = Description of Artificial Sequence: Syntheticoligonucleotide
  source 1..16: mol_type = other DNA
gcacttggtcaaatca

SEQ ID NO: 2725 - DNA, 16 bp, synthetic construct
  misc_feature 1..16: note = Description of Artificial Sequence: Syntheticoligonucleotide
  source 1..16: mol_type = other DNA
ggacaaccttttggaa

SEQ ID NO: 2726 - DNA, 16 bp, synthetic construct
  misc_feature 1..16: note = Description of Artificial Sequence: Syntheticoligonucleotide
  source 1..16: mol_type = other DNA
tattaggagtaaggac

SEQ ID NO: 2727 - DNA, 16 bp, synthetic construct
  misc_feature 1..16: note = Description of Artificial Sequence: Syntheticoligonucleotide
  source 1..16: mol_type = other DNA
atatgtaatggctgat

SEQ ID NO: 2728 - DNA, 16 bp, synthetic construct
  misc_feature 1..16: note = Description of Artificial Sequence: Syntheticoligonucleotide
  source 1..16: mol_type = other DNA
gccataaaagagacta

SEQ ID NO: 2729 - DNA, 16 bp, synthetic construct
  misc_feature 1..16: note = Description of Artificial Sequence: Syntheticoligonucleotide
  source 1..16: mol_type = other DNA
tctaaacaaagactcc

SEQ ID NO: 2730 - DNA, 16 bp, synthetic construct
  misc_feature 1..16: note = Description of Artificial Sequence: Syntheticoligonucleotide
  source 1..16: mol_type = other DNA
tagtcagtccattatc

SEQ ID NO: 2731 - DNA, 16 bp, synthetic construct
  misc_feature 1..16: note = Description of Artificial Sequence: Syntheticoligonucleotide
  source 1..16: mol_type = other DNA
aagcttggacatggac

SEQ ID NO: 2732 - DNA, 16 bp, synthetic construct
  misc_feature 1..16: note = Description of Artificial Sequence: Syntheticoligonucleotide
  source 1..16: mol_type = other DNA
cgagaggaggattgcc

SEQ ID NO: 2733 - DNA, 16 bp, synthetic construct
  misc_feature 1..16: note = Description of Artificial Sequence: Syntheticoligonucleotide
  source 1..16: mol_type = other DNA
ctgcagggcttcaagt

SEQ ID NO: 2734 - DNA, 16 bp, synthetic construct
  misc_feature 1..16: note = Description of Artificial Sequence: Syntheticoligonucleotide
  source 1..16: mol_type = other DNA
agatctaggcttggat

SEQ ID NO: 2735 - DNA, 16 bp, synthetic construct
  misc_feature 1..16: note = Description of Artificial Sequence: Syntheticoligonucleotide
  source 1..16: mol_type = other DNA
caccacgctctggcca

SEQ ID NO: 2736 - DNA, 16 bp, synthetic construct
  misc_feature 1..16: note = Description of Artificial Sequence: Syntheticoligonucleotide
  source 1..16: mol_type = other DNA
caaatacatggccact

SEQ ID NO: 2737 - DNA, 16 bp, synthetic construct
  misc_feature 1..16: note = Description of Artificial Sequence: Syntheticoligonucleotide
  source 1..16: mol_type = other DNA
ttagatttaaaggatc

SEQ ID NO: 2738 - DNA, 16 bp, synthetic construct
  misc_feature 1..16: note = Description of Artificial Sequence: Syntheticoligonucleotide
  source 1..16: mol_type = other DNA
tggcccttcttgggtt

SEQ ID NO: 2739 - DNA, 16 bp, synthetic construct
  misc_feature 1..16: note = Description of Artificial Sequence: Syntheticoligonucleotide
  source 1..16: mol_type = other DNA
cgggcttcatcgacac

SEQ ID NO: 2740 - DNA, 16 bp, synthetic construct
  misc_feature 1..16: note = Description of Artificial Sequence: Syntheticoligonucleotide
  source 1..16: mol_type = other DNA
cctttctgactgggtt

SEQ ID NO: 2741 - DNA, 16 bp, synthetic construct
  misc_feature 1..16: note = Description of Artificial Sequence: Syntheticoligonucleotide
  source 1..16: mol_type = other DNA
gagctaagaattctcc

SEQ ID NO: 2742 - DNA, 16 bp, synthetic construct
  misc_feature 1..16: note = Description of Artificial Sequence: Syntheticoligonucleotide
  source 1..16: mol_type = other DNA
gagcactggtgagatg

SEQ ID NO: 2743 - DNA, 16 bp, synthetic construct
  misc_feature 1..16: note = Description of Artificial Sequence: Syntheticoligonucleotide
  source 1..16: mol_type = other DNA
tatagaagggttctgg

SEQ ID NO: 2744 - DNA, 16 bp, synthetic construct
  misc_feature 1..16: note = Description of Artificial Sequence: Syntheticoligonucleotide
  source 1..16: mol_type = other DNA
agccaaccccattata

SEQ ID NO: 2745 - DNA, 16 bp, synthetic construct
  misc_feature 1..16: note = Description of Artificial Sequence: Syntheticoligonucleotide
  source 1..16: mol_type = other DNA
gtccaagccacgcaag

SEQ ID NO: 2746 - DNA, 16 bp, synthetic construct
  misc_feature 1..16: note = Description of Artificial Sequence: Syntheticoligonucleotide
  source 1..16: mol_type = other DNA
ggaggcgagtccagga

SEQ ID NO: 2747 - DNA, 16 bp, synthetic construct
  misc_feature 1..16: note = Description of Artificial Sequence: Syntheticoligonucleotide
  source 1..16: mol_type = other DNA
aggaccgagctgacat

SEQ ID NO: 2748 - DNA, 16 bp, synthetic construct
  misc_feature 1..16: note = Description of Artificial Sequence: Syntheticoligonucleotide
  source 1..16: mol_type = other DNA
cgagaagtgggtagat

SEQ ID NO: 2749 - DNA, 16 bp, synthetic construct
  misc_feature 1..16: note = Description of Artificial Sequence: Syntheticoligonucleotide
  source 1..16: mol_type = other DNA
ctcggagtcctatttt

SEQ ID NO: 2750 - DNA, 16 bp, synthetic construct
  misc_feature 1..16: note = Description of Artificial Sequence: Syntheticoligonucleotide
  source 1..16: mol_type = other DNA
gcccacgctagcacag

SEQ ID NO: 2751 - DNA, 16 bp, synthetic construct
  misc_feature 1..16: note = Description of Artificial Sequence: Syntheticoligonucleotide
  source 1..16: mol_type = other DNA
aggtaccccaccctgc

SEQ ID NO: 2752 - DNA, 16 bp, synthetic construct
  misc_feature 1..16: note = Description of Artificial Sequence: Syntheticoligonucleotide
  source 1..16: mol_type = other DNA
caatacggcctcctcc

SEQ ID NO: 2753 - DNA, 16 bp, synthetic construct
  misc_feature 1..16: note = Description of Artificial Sequence: Syntheticoligonucleotide
  source 1..16: mol_type = other DNA
tgcaagcccacatggt

SEQ ID NO: 2754 - DNA, 16 bp, synthetic construct
  misc_feature 1..16: note = Description of Artificial Sequence: Syntheticoligonucleotide
  source 1..16: mol_type = other DNA
gaggtgttaccaggtg

SEQ ID NO: 2755 - DNA, 16 bp, synthetic construct
  misc_feature 1..16: note = Description of Artificial Sequence: Syntheticoligonucleotide
  source 1..16: mol_type = other DNA
tgcatctttaaggttc

SEQ ID NO: 2756 - DNA, 16 bp, synthetic construct
  misc_feature 1..16: note = Description of Artificial Sequence: Syntheticoligonucleotide
  source 1..16: mol_type = other DNA
cttaaagacggccatt

SEQ ID NO: 2757 - DNA, 16 bp, synthetic construct
  misc_feature 1..16: note = Description of Artificial Sequence: Syntheticoligonucleotide
  source 1..16: mol_type = other DNA
cttattgggatgaagc

SEQ ID NO: 2758 - DNA, 16 bp, synthetic construct
  misc_feature 1..16: note = Description of Artificial Sequence: Syntheticoligonucleotide
  source 1..16: mol_type = other DNA
tagcagggcaaagcag

SEQ ID NO: 2759 - DNA, 16 bp, synthetic construct
  misc_feature 1..16: note = Description of Artificial Sequence: Syntheticoligonucleotide
  source 1..16: mol_type = other DNA
cagcagccatctagag

SEQ ID NO: 2760 - DNA, 16 bp, synthetic construct
  misc_feature 1..16: note = Description of Artificial Sequence: Syntheticoligonucleotide
  source 1..16: mol_type = other DNA
gcctaagtagggagaa

SEQ ID NO: 2761 - DNA, 16 bp, synthetic construct
  misc_feature 1..16: note = Description of Artificial Sequence: Syntheticoligonucleotide
  source 1..16: mol_type = other DNA
gctacggtcttccctg

SEQ ID NO: 2762 - DNA, 16 bp, synthetic construct
  misc_feature 1..16: note = Description of Artificial Sequence: Syntheticoligonucleotide
  source 1..16: mol_type = other DNA
gacagatttccaggtc

SEQ ID NO: 2763 - DNA, 16 bp, synthetic construct
  misc_feature 1..16: note = Description of Artificial Sequence: Syntheticoligonucleotide
  source 1..16: mol_type = other DNA
gacctatgtggttatg

SEQ ID NO: 2764 - DNA, 16 bp, synthetic construct
  misc_feature 1..16: note = Description of Artificial Sequence: Syntheticoligonucleotide
  source 1..16: mol_type = other DNA
acgccctcttctaaat

SEQ ID NO: 2765 - DNA, 16 bp, synthetic construct
  misc_feature 1..16: note = Description of Artificial Sequence: Syntheticoligonucleotide
  source 1..16: mol_type = other DNA
gctcctttgcaccctc

SEQ ID NO: 2766 - DNA, 16 bp, synthetic construct
  misc_feature 1..16: note = Description of Artificial Sequence: Syntheticoligonucleotide
  source 1..16: mol_type = other DNA
atggccccaatcccca

SEQ ID NO: 2767 - DNA, 16 bp, synthetic construct
  misc_feature 1..16: note = Description of Artificial Sequence: Syntheticoligonucleotide
  source 1..16: mol_type = other DNA
ctcctggaattactta

SEQ ID NO: 2768 - DNA, 16 bp, synthetic construct
  misc_feature 1..16: note = Description of Artificial Sequence: Syntheticoligonucleotide
  source 1..16: mol_type = other DNA
agcagtggataggtga

SEQ ID NO: 2769 - DNA, 16 bp, synthetic construct
  misc_feature 1..16: note = Description of Artificial Sequence: Syntheticoligonucleotide
  source 1..16: mol_type = other DNA
gaaaagaagcggagta

SEQ ID NO: 2770 - DNA, 16 bp, synthetic construct
  misc_feature 1..16: note = Description of Artificial Sequence: Syntheticoligonucleotide
  source 1..16: mol_type = other DNA
caacacccgtgtccac

SEQ ID NO: 2771 - DNA, 16 bp, synthetic construct
  misc_feature 1..16: note = Description of Artificial Sequence: Syntheticoligonucleotide
  source 1..16: mol_type = other DNA
caggacctcctagcta

SEQ ID NO: 2772 - DNA, 16 bp, synthetic construct
  misc_feature 1..16: note = Description of Artificial Sequence: Syntheticoligonucleotide
  source 1..16: mol_type = other DNA
gaatggaggaacccac

SEQ ID NO: 2773 - DNA, 16 bp, synthetic construct
  misc_feature 1..16: note = Description of Artificial Sequence: Syntheticoligonucleotide
  source 1..16: mol_type = other DNA
ccaggagagggttagg

SEQ ID NO: 2774 - DNA, 16 bp, synthetic construct
  misc_feature 1..16: note = Description of Artificial Sequence: Syntheticoligonucleotide
  source 1..16: mol_type = other DNA
tcaaatgggtgttaca

SEQ ID NO: 2775 - DNA, 16 bp, synthetic construct
  misc_feature 1..16: note = Description of Artificial Sequence: Syntheticoligonucleotide
  source 1..16: mol_type = other DNA
gtcagcgatgatgatt

SEQ ID NO: 2776 - DNA, 16 bp, synthetic construct
  misc_feature 1..16: note = Description of Artificial Sequence: Syntheticoligonucleotide
  source 1..16: mol_type = other DNA
aattatcgagtatctt

SEQ ID NO: 2777 - DNA, 16 bp, synthetic construct
  misc_feature 1..16: note = Description of Artificial Sequence: Syntheticoligonucleotide
  source 1..16: mol_type = other DNA
ggctagggctgaagtg

SEQ ID NO: 2778 - DNA, 16 bp, synthetic construct
  misc_feature 1..16: note = Description of Artificial Sequence: Syntheticoligonucleotide
  source 1..16: mol_type = other DNA
ctatgacctaccccga

SEQ ID NO: 2779 - DNA, 16 bp, synthetic construct
  misc_feature 1..16: note = Description of Artificial Sequence: Syntheticoligonucleotide
  source 1..16: mol_type = other DNA
tcagggacatggttag

SEQ ID NO: 2780 - DNA, 16 bp, synthetic construct
  misc_feature 1..16: note = Description of Artificial Sequence: Syntheticoligonucleotide
  source 1..16: mol_type = other DNA
actttgcttttatacc

SEQ ID NO: 2781 - DNA, 16 bp, synthetic construct
  misc_feature 1..16: note = Description of Artificial Sequence: Syntheticoligonucleotide
  source 1..16: mol_type = other DNA
gggccccgcctcgaag

SEQ ID NO: 2782 - DNA, 16 bp, synthetic construct
  misc_feature 1..16: note = Description of Artificial Sequence: Syntheticoligonucleotide
  source 1..16: mol_type = other DNA
aggaactctgggaatg

SEQ ID NO: 2783 - DNA, 16 bp, synthetic construct
  misc_feature 1..16: note = Description of Artificial Sequence: Syntheticoligonucleotide
  source 1..16: mol_type = other DNA
gttgtggaggaactct

SEQ ID NO: 2784 - DNA, 16 bp, synthetic construct
  misc_feature 1..16: note = Description of Artificial Sequence: Syntheticoligonucleotide
  source 1..16: mol_type = other DNA
ttgagtgtccgctgct

SEQ ID NO: 2785 - DNA, 16 bp, synthetic construct
  misc_feature 1..16: note = Description of Artificial Sequence: Syntheticoligonucleotide
  source 1..16: mol_type = other DNA
agctttgaggttgttt

SEQ ID NO: 2786 - DNA, 16 bp, synthetic construct
  misc_feature 1..16: note = Description of Artificial Sequence: Syntheticoligonucleotide
  source 1..16: mol_type = other DNA
tgattgtgtgatgatg

SEQ ID NO: 2787 - DNA, 16 bp, synthetic construct
  misc_feature 1..16: note = Description of Artificial Sequence: Syntheticoligonucleotide
  source 1..16: mol_type = other DNA
gatacacaggtgaatt

SEQ ID NO: 2788 - DNA, 16 bp, synthetic construct
  misc_feature 1..16: note = Description of Artificial Sequence: Syntheticoligonucleotide
  source 1..16: mol_type = other DNA
gggagtgaggtgagtg

SEQ ID NO: 2789 - DNA, 16 bp, synthetic construct
  misc_feature 1..16: note = Description of Artificial Sequence: Syntheticoligonucleotide
  source 1..16: mol_type = other DNA
gccgtgcctacctccc

SEQ ID NO: 2790 - DNA, 16 bp, synthetic construct
  misc_feature 1..16: note = Description of Artificial Sequence: Syntheticoligonucleotide
  source 1..16: mol_type = other DNA
cccccccgccgtgcct

SEQ ID NO: 2791 - DNA, 16 bp, synthetic construct
  misc_feature 1..16: note = Description of Artificial Sequence: Syntheticoligonucleotide
  source 1..16: mol_type = other DNA
ggctggaatcacggta

SEQ ID NO: 2792 - DNA, 16 bp, synthetic construct
  misc_feature 1..16: note = Description of Artificial Sequence: Syntheticoligonucleotide
  source 1..16: mol_type = other DNA
ttcaagttgttcaaag

SEQ ID NO: 2793 - DNA, 16 bp, synthetic construct
  misc_feature 1..16: note = Description of Artificial Sequence: Syntheticoligonucleotide
  source 1..16: mol_type = other DNA
tcgatggagtgtggtc

SEQ ID NO: 2794 - DNA, 16 bp, synthetic construct
  misc_feature 1..16: note = Description of Artificial Sequence: Syntheticoligonucleotide
  source 1..16: mol_type = other DNA
accttgcaatcctcct

SEQ ID NO: 2795 - DNA, 16 bp, synthetic construct
  misc_feature 1..16: note = Description of Artificial Sequence: Syntheticoligonucleotide
  source 1..16: mol_type = other DNA
gtgtgaagtgctccct

SEQ ID NO: 2796 - DNA, 16 bp, synthetic construct
  misc_feature 1..16: note = Description of Artificial Sequence: Syntheticoligonucleotide
  source 1..16: mol_type = other DNA
attctaatttggttac

SEQ ID NO: 2797 - DNA, 16 bp, synthetic construct
  misc_feature 1..16: note = Description of Artificial Sequence: Syntheticoligonucleotide
  source 1..16: mol_type = other DNA
atagcatgattctaat

SEQ ID NO: 2798 - DNA, 16 bp, synthetic construct
  misc_feature 1..16: note = Description of Artificial Sequence: Syntheticoligonucleotide
  source 1..16: mol_type = other DNA
caaatcaatcaaagtt

SEQ ID NO: 2799 - DNA, 16 bp, synthetic construct
  misc_feature 1..16: note = Description of Artificial Sequence: Syntheticoligonucleotide
  source 1..16: mol_type = other DNA
acgccccctttgcccc

SEQ ID NO: 2800 - DNA, 16 bp, synthetic construct
  misc_feature 1..16: note = Description of Artificial Sequence: Syntheticoligonucleotide
  source 1..16: mol_type = other DNA
attagcagagagggtc

SEQ ID NO: 2801 - DNA, 16 bp, synthetic construct
  misc_feature 1..16: note = Description of Artificial Sequence: Syntheticoligonucleotide
  source 1..16: mol_type = other DNA
gcatgaatggccaatg

SEQ ID NO: 2802 - DNA, 16 bp, synthetic construct
  misc_feature 1..16: note = Description of Artificial Sequence: Syntheticoligonucleotide
  source 1..16: mol_type = other DNA
tgtaatggctgatgaa

SEQ ID NO: 2803 - DNA, 16 bp, synthetic construct
  misc_feature 1..16: note = Description of Artificial Sequence: Syntheticoligonucleotide
  source 1..16: mol_type = other DNA
agtacatatgaggaaa

SEQ ID NO: 2804 - DNA, 16 bp, synthetic construct
  misc_feature 1..16: note = Description of Artificial Sequence: Syntheticoligonucleotide
  source 1..16: mol_type = other DNA
accattgcagtacata

SEQ ID NO: 2805 - DNA, 16 bp, synthetic construct
  misc_feature 1..16: note = Description of Artificial Sequence: Syntheticoligonucleotide
  source 1..16: mol_type = other DNA
aatgctgatcttgggt

SEQ ID NO: 2806 - DNA, 16 bp, synthetic construct
  misc_feature 1..16: note = Description of Artificial Sequence: Syntheticoligonucleotide
  source 1..16: mol_type = other DNA
ggaggaccatggagta

SEQ ID NO: 2807 - DNA, 16 bp, synthetic construct
  misc_feature 1..16: note = Description of Artificial Sequence: Syntheticoligonucleotide
  source 1..16: mol_type = other DNA
tttgctggtctctggc

SEQ ID NO: 2808 - DNA, 16 bp, synthetic construct
  misc_feature 1..16: note = Description of Artificial Sequence: Syntheticoligonucleotide
  source 1..16: mol_type = other DNA
gacaattgcccctcta

SEQ ID NO: 2809 - DNA, 16 bp, synthetic construct
  misc_feature 1..16: note = Description of Artificial Sequence: Syntheticoligonucleotide
  source 1..16: mol_type = other DNA
ttctacgctgtctggt

SEQ ID NO: 2810 - DNA, 16 bp, synthetic construct
  misc_feature 1..16: note = Description of Artificial Sequence: Syntheticoligonucleotide
  source 1..16: mol_type = other DNA
tttcggtgaggccctg

SEQ ID NO: 2811 - DNA, 16 bp, synthetic construct
  misc_feature 1..16: note = Description of Artificial Sequence: Syntheticoligonucleotide
  source 1..16: mol_type = other DNA
tggatttcaactctgc

SEQ ID NO: 2812 - DNA, 16 bp, synthetic construct
  misc_feature 1..16: note = Description of Artificial Sequence: Syntheticoligonucleotide
  source 1..16: mol_type = other DNA
ggaatggtagcccagg

SEQ ID NO: 2813 - DNA, 16 bp, synthetic construct
  misc_feature 1..16: note = Description of Artificial Sequence: Syntheticoligonucleotide
  source 1..16: mol_type = other DNA
ctgacatgcctccatc

SEQ ID NO: 2814 - DNA, 16 bp, synthetic construct
  misc_feature 1..16: note = Description of Artificial Sequence: Syntheticoligonucleotide
  source 1..16: mol_type = other DNA
cccacaatcaaggttt

SEQ ID NO: 2815 - DNA, 16 bp, synthetic construct
  misc_feature 1..16: note = Description of Artificial Sequence: Syntheticoligonucleotide
  source 1..16: mol_type = other DNA
tcagtatgtgtaggcc

SEQ ID NO: 2816 - DNA, 16 bp, synthetic construct
  misc_feature 1..16: note = Description of Artificial Sequence: Syntheticoligonucleotide
  source 1..16: mol_type = other DNA
actatgacaagcccct

SEQ ID NO: 2817 - DNA, 16 bp, synthetic construct
  misc_feature 1..16: note = Description of Artificial Sequence: Syntheticoligonucleotide
  source 1..16: mol_type = other DNA
ccccgacttgcccaga

SEQ ID NO: 2818 - DNA, 16 bp, synthetic construct
  misc_feature 1..16: note = Description of Artificial Sequence: Syntheticoligonucleotide
  source 1..16: mol_type = other DNA
acattctcagacaggg

SEQ ID NO: 2819 - DNA, 16 bp, synthetic construct
  misc_feature 1..16: note = Description of Artificial Sequence: Syntheticoligonucleotide
  source 1..16: mol_type = other DNA
catgtggctggcctgt

SEQ ID NO: 2820 - DNA, 16 bp, synthetic construct
  misc_feature 1..16: note = Description of Artificial Sequence: Syntheticoligonucleotide
  source 1..16: mol_type = other DNA
ttcttagtctcctggg

SEQ ID NO: 2821 - DNA, 16 bp, synthetic construct
  misc_feature 1..16: note = Description of Artificial Sequence: Syntheticoligonucleotide
  source 1..16: mol_type = other DNA
cttttcaggatcctat

SEQ ID NO: 2822 - DNA, 16 bp, synthetic construct
  misc_feature 1..16: note = Description of Artificial Sequence: Syntheticoligonucleotide
  source 1..16: mol_type = other DNA
tgctacaccccctgcc

SEQ ID NO: 2823 - DNA, 16 bp, synthetic construct
  misc_feature 1..16: note = Description of Artificial Sequence: Syntheticoligonucleotide
  source 1..16: mol_type = other DNA
gagttggattgggtgc

SEQ ID NO: 2824 - DNA, 16 bp, synthetic construct
  misc_feature 1..16: note = Description of Artificial Sequence: Syntheticoligonucleotide
  source 1..16: mol_type = other DNA
aagtgacatgggtttt

SEQ ID NO: 2825 - DNA, 16 bp, synthetic construct
  misc_feature 1..16: note = Description of Artificial Sequence: Syntheticoligonucleotide
  source 1..16: mol_type = other DNA
ggatgtagtgggcaag

SEQ ID NO: 2826 - DNA, 16 bp, synthetic construct
  misc_feature 1..16: note = Description of Artificial Sequence: Syntheticoligonucleotide
  source 1..16: mol_type = other DNA
cggagtcctattttgc

SEQ ID NO: 2827 - DNA, 16 bp, synthetic construct
  misc_feature 1..16: note = Description of Artificial Sequence: Syntheticoligonucleotide
  source 1..16: mol_type = other DNA
catagttgcaccccag

SEQ ID NO: 2828 - DNA, 16 bp, synthetic construct
  misc_feature 1..16: note = Description of Artificial Sequence: Syntheticoligonucleotide
  source 1..16: mol_type = other DNA
gcggtatgagatactc

SEQ ID NO: 2829 - DNA, 16 bp, synthetic construct
  misc_feature 1..16: note = Description of Artificial Sequence: Syntheticoligonucleotide
  source 1..16: mol_type = other DNA
tcccgcccagtgccac

SEQ ID NO: 2830 - DNA, 16 bp, synthetic construct
  misc_feature 1..16: note = Description of Artificial Sequence: Syntheticoligonucleotide
  source 1..16: mol_type = other DNA
tgggactacaatacgg

SEQ ID NO: 2831 - DNA, 16 bp, synthetic construct
  misc_feature 1..16: note = Description of Artificial Sequence: Syntheticoligonucleotide
  source 1..16: mol_type = other DNA
cctacttggccccagt

SEQ ID NO: 2832 - DNA, 16 bp, synthetic construct
  misc_feature 1..16: note = Description of Artificial Sequence: Syntheticoligonucleotide
  source 1..16: mol_type = other DNA
ctcatggagatcgagt

SEQ ID NO: 2833 - DNA, 16 bp, synthetic construct
  misc_feature 1..16: note = Description of Artificial Sequence: Syntheticoligonucleotide
  source 1..16: mol_type = other DNA
gtgtctaattcaaata

SEQ ID NO: 2834 - DNA, 16 bp, synthetic construct
  misc_feature 1..16: note = Description of Artificial Sequence: Syntheticoligonucleotide
  source 1..16: mol_type = other DNA
gacacctttgaccccc

SEQ ID NO: 2835 - DNA, 16 bp, synthetic construct
  misc_feature 1..16: note = Description of Artificial Sequence: Syntheticoligonucleotide
  source 1..16: mol_type = other DNA
attctgcatctttaag

SEQ ID NO: 2836 - DNA, 16 bp, synthetic construct
  misc_feature 1..16: note = Description of Artificial Sequence: Syntheticoligonucleotide
  source 1..16: mol_type = other DNA
ttgtaaagctctgtgg

SEQ ID NO: 2837 - DNA, 16 bp, synthetic construct
  misc_feature 1..16: note = Description of Artificial Sequence: Syntheticoligonucleotide
  source 1..16: mol_type = other DNA
gagaagcttaaagacg

SEQ ID NO: 2838 - DNA, 16 bp, synthetic construct
  misc_feature 1..16: note = Description of Artificial Sequence: Syntheticoligonucleotide
  source 1..16: mol_type = other DNA
tattgggatgaagcct

SEQ ID NO: 2839 - DNA, 16 bp, synthetic construct
  misc_feature 1..16: note = Description of Artificial Sequence: Syntheticoligonucleotide
  source 1..16: mol_type = other DNA
ctggctacatgggttc

SEQ ID NO: 2840 - DNA, 16 bp, synthetic construct
  misc_feature 1..16: note = Description of Artificial Sequence: Syntheticoligonucleotide
  source 1..16: mol_type = other DNA
tgagttgagaatgggc

SEQ ID NO: 2841 - DNA, 16 bp, synthetic construct
  misc_feature 1..16: note = Description of Artificial Sequence: Syntheticoligonucleotide
  source 1..16: mol_type = other DNA
ctggcagtgcctaagt

SEQ ID NO: 2842 - DNA, 16 bp, synthetic construct
  misc_feature 1..16: note = Description of Artificial Sequence: Syntheticoligonucleotide
  source 1..16: mol_type = other DNA
tttataccagccctcg

SEQ ID NO: 2843 - DNA, 16 bp, synthetic construct
  misc_feature 1..16: note = Description of Artificial Sequence: Syntheticoligonucleotide
  source 1..16: mol_type = other DNA
gaatgtgaggttaggt

SEQ ID NO: 2844 - DNA, 16 bp, synthetic construct
  misc_feature 1..16: note = Description of Artificial Sequence: Syntheticoligonucleotide
  source 1..16: mol_type = other DNA
cttagagtcagagggt

SEQ ID NO: 2845 - DNA, 16 bp, synthetic construct
  misc_feature 1..16: note = Description of Artificial Sequence: Syntheticoligonucleotide
  source 1..16: mol_type = other DNA
caactcaggatcacag

SEQ ID NO: 2846 - DNA, 16 bp, synthetic construct
  misc_feature 1..16: note = Description of Artificial Sequence: Syntheticoligonucleotide
  source 1..16: mol_type = other DNA
tggtcgccatcttgaa

SEQ ID NO: 2847 - DNA, 16 bp, synthetic construct
  misc_feature 1..16: note = Description of Artificial Sequence: Syntheticoligonucleotide
  source 1..16: mol_type = other DNA
gtgacctatgtggtta

SEQ ID NO: 2848 - DNA, 16 bp, synthetic construct
  misc_feature 1..16: note = Description of Artificial Sequence: Syntheticoligonucleotide
  source 1..16: mol_type = other DNA
acagcatgagccgtat

SEQ ID NO: 2849 - DNA, 16 bp, synthetic construct
  misc_feature 1..16: note = Description of Artificial Sequence: Syntheticoligonucleotide
  source 1..16: mol_type = other DNA
gctggagtccagagtg

SEQ ID NO: 2850 - DNA, 16 bp, synthetic construct
  misc_feature 1..16: note = Description of Artificial Sequence: Syntheticoligonucleotide
  source 1..16: mol_type = other DNA
gaggttgaaaagaagc

SEQ ID NO: 2851 - DNA, 16 bp, synthetic construct
  misc_feature 1..16: note = Description of Artificial Sequence: Syntheticoligonucleotide
  source 1..16: mol_type = other DNA
ggtaggtttagggtca

SEQ ID NO: 2852 - DNA, 16 bp, synthetic construct
  misc_feature 1..16: note = Description of Artificial Sequence: Syntheticoligonucleotide
  source 1..16: mol_type = other DNA
tgttacaaggaaaggt

SEQ ID NO: 2853 - DNA, 16 bp, synthetic construct
  misc_feature 1..16: note = Description of Artificial Sequence: Syntheticoligonucleotide
  source 1..16: mol_type = other DNA
aatatctggtatcatg

SEQ ID NO: 2854 - DNA, 16 bp, synthetic construct
  misc_feature 1..16: note = Description of Artificial Sequence: Syntheticoligonucleotide
  source 1..16: mol_type = other DNA
ttggattcaggaatgg

SEQ ID NO: 2855 - DNA, 16 bp, synthetic construct
  misc_feature 1..16: note = Description of Artificial Sequence: Syntheticoligonucleotide
  source 1..16: mol_type = other DNA
ggtaatcagggacagg

SEQ ID NO: 2856 - DNA, 16 bp, synthetic construct
  misc_feature 1..16: note = Description of Artificial Sequence: Syntheticoligonucleotide
  source 1..16: mol_type = other DNA
tgtgggaaactgtcac

SEQ ID NO: 2857 - DNA, 16 bp, synthetic construct
  misc_feature 1..16: note = Description of Artificial Sequence: Syntheticoligonucleotide
  source 1..16: mol_type = other DNA
ggtccgcctggcagtg

SEQ ID NO: 2858 - DNA, 16 bp, synthetic construct
  misc_feature 1..16: note = Description of Artificial Sequence: Syntheticoligonucleotide
  source 1..16: mol_type = other DNA
ggaggaactctgggaa

SEQ ID NO: 2859 - DNA, 16 bp, synthetic construct
  misc_feature 1..16: note = Description of Artificial Sequence: Syntheticoligonucleotide
  source 1..16: mol_type = other DNA
gtccgctgcttctctg

SEQ ID NO: 2860 - DNA, 16 bp, synthetic construct
  misc_feature 1..16: note = Description of Artificial Sequence: Syntheticoligonucleotide
  source 1..16: mol_type = other DNA
gaggttgtttgagtgt

SEQ ID NO: 2861 - DNA, 16 bp, synthetic construct
  misc_feature 1..16: note = Description of Artificial Sequence: Syntheticoligonucleotide
  source 1..16: mol_type = other DNA
atgcagctttgaggtt

SEQ ID NO: 2862 - DNA, 16 bp, synthetic construct
  misc_feature 1..16: note = Description of Artificial Sequence: Syntheticoligonucleotide
  source 1..16: mol_type = other DNA
tgtgattgtgtgatga

SEQ ID NO: 2863 - DNA, 16 bp, synthetic construct
  misc_feature 1..16: note = Description of Artificial Sequence: Syntheticoligonucleotide
  source 1..16: mol_type = other DNA
gagatacacaggtgaa

SEQ ID NO: 2864 - DNA, 16 bp, synthetic construct
  misc_feature 1..16: note = Description of Artificial Sequence: Syntheticoligonucleotide
  source 1..16: mol_type = other DNA
atgggagtgaggtgag

SEQ ID NO: 2865 - DNA, 16 bp, synthetic construct
  misc_feature 1..16: note = Description of Artificial Sequence: Syntheticoligonucleotide
  source 1..16: mol_type = other DNA
ccgccgtgcctacctc

SEQ ID NO: 2866 - DNA, 16 bp, synthetic construct
  misc_feature 1..16: note = Description of Artificial Sequence: Syntheticoligonucleotide
  source 1..16: mol_type = other DNA
cactgtaccagagggc

SEQ ID NO: 2867 - DNA, 16 bp, synthetic construct
  misc_feature 1..16: note = Description of Artificial Sequence: Syntheticoligonucleotide
  source 1..16: mol_type = other DNA
tcaattgatgaattca

SEQ ID NO: 2868 - DNA, 16 bp, synthetic construct
  misc_feature 1..16: note = Description of Artificial Sequence: Syntheticoligonucleotide
  source 1..16: mol_type = other DNA
catttcaagttgttca

SEQ ID NO: 2869 - DNA, 16 bp, synthetic construct
  misc_feature 1..16: note = Description of Artificial Sequence: Syntheticoligonucleotide
  source 1..16: mol_type = other DNA
gtgtacaaagctctag

SEQ ID NO: 2870 - DNA, 16 bp, synthetic construct
  misc_feature 1..16: note = Description of Artificial Sequence: Syntheticoligonucleotide
  source 1..16: mol_type = other DNA
gttcagttaagtgctc

SEQ ID NO: 2871 - DNA, 16 bp, synthetic construct
  misc_feature 1..16: note = Description of Artificial Sequence: Syntheticoligonucleotide
  source 1..16: mol_type = other DNA
acagctaaactacggt

SEQ ID NO: 2872 - DNA, 16 bp, synthetic construct
  misc_feature 1..16: note = Description of Artificial Sequence: Syntheticoligonucleotide
  source 1..16: mol_type = other DNA
tgattctaatttggtt

SEQ ID NO: 2873 - DNA, 16 bp, synthetic construct
  misc_feature 1..16: note = Description of Artificial Sequence: Syntheticoligonucleotide
  source 1..16: mol_type = other DNA
aatcaaagttcatgct

SEQ ID NO: 2874 - DNA, 16 bp, synthetic construct
  misc_feature 1..16: note = Description of Artificial Sequence: Syntheticoligonucleotide
  source 1..16: mol_type = other DNA
cccctttgccccagca

SEQ ID NO: 2875 - DNA, 16 bp, synthetic construct
  misc_feature 1..16: note = Description of Artificial Sequence: Syntheticoligonucleotide
  source 1..16: mol_type = other DNA
tgcacgccccctttgc

SEQ ID NO: 2876 - DNA, 16 bp, synthetic construct
  misc_feature 1..16: note = Description of Artificial Sequence: Syntheticoligonucleotide
  source 1..16: mol_type = other DNA
taggacaaccttttgg

SEQ ID NO: 2877 - DNA, 16 bp, synthetic construct
  misc_feature 1..16: note = Description of Artificial Sequence: Syntheticoligonucleotide
  source 1..16: mol_type = other DNA
ttaggagtaaggacat

SEQ ID NO: 2878 - DNA, 16 bp, synthetic construct
  misc_feature 1..16: note = Description of Artificial Sequence: Syntheticoligonucleotide
  source 1..16: mol_type = other DNA
tgctatatatgtaatg

SEQ ID NO: 2879 - DNA, 16 bp, synthetic construct
  misc_feature 1..16: note = Description of Artificial Sequence: Syntheticoligonucleotide
  source 1..16: mol_type = other DNA
tgcagtacatatgagg

SEQ ID NO: 2880 - DNA, 16 bp, synthetic construct
  misc_feature 1..16: note = Description of Artificial Sequence: Syntheticoligonucleotide
  source 1..16: mol_type = other DNA
tcttgggtttattgtg

SEQ ID NO: 2881 - DNA, 16 bp, synthetic construct
  misc_feature 1..16: note = Description of Artificial Sequence: Syntheticoligonucleotide
  source 1..16: mol_type = other DNA
tcatcatataccctaa

SEQ ID NO: 2882 - DNA, 16 bp, synthetic construct
  misc_feature 1..16: note = Description of Artificial Sequence: Syntheticoligonucleotide
  source 1..16: mol_type = other DNA
cccacatatggagaga

SEQ ID NO: 2883 - DNA, 16 bp, synthetic construct
  misc_feature 1..16: note = Description of Artificial Sequence: Syntheticoligonucleotide
  source 1..16: mol_type = other DNA
catttgctggtctctg

SEQ ID NO: 2884 - DNA, 16 bp, synthetic construct
  misc_feature 1..16: note = Description of Artificial Sequence: Syntheticoligonucleotide
  source 1..16: mol_type = other DNA
taggtgtctgcagggc

SEQ ID NO: 2885 - DNA, 16 bp, synthetic construct
  misc_feature 1..16: note = Description of Artificial Sequence: Syntheticoligonucleotide
  source 1..16: mol_type = other DNA
tggagtagacaagggc

SEQ ID NO: 2886 - DNA, 16 bp, synthetic construct
  misc_feature 1..16: note = Description of Artificial Sequence: Syntheticoligonucleotide
  source 1..16: mol_type = other DNA
tcaactctgccgctgc

SEQ ID NO: 2887 - DNA, 16 bp, synthetic construct
  misc_feature 1..16: note = Description of Artificial Sequence: Syntheticoligonucleotide
  source 1..16: mol_type = other DNA
cccacctagagtcctg

SEQ ID NO: 2888 - DNA, 16 bp, synthetic construct
  misc_feature 1..16: note = Description of Artificial Sequence: Syntheticoligonucleotide
  source 1..16: mol_type = other DNA
catgcctccatcatca

SEQ ID NO: 2889 - DNA, 16 bp, synthetic construct
  misc_feature 1..16: note = Description of Artificial Sequence: Syntheticoligonucleotide
  source 1..16: mol_type = other DNA
tgactgacatgcctcc

SEQ ID NO: 2890 - DNA, 16 bp, synthetic construct
  misc_feature 1..16: note = Description of Artificial Sequence: Syntheticoligonucleotide
  source 1..16: mol_type = other DNA
cctttggtctgggcct

SEQ ID NO: 2891 - DNA, 16 bp, synthetic construct
  misc_feature 1..16: note = Description of Artificial Sequence: Syntheticoligonucleotide
  source 1..16: mol_type = other DNA
cggtcccaaagtctca

SEQ ID NO: 2892 - DNA, 16 bp, synthetic construct
  misc_feature 1..16: note = Description of Artificial Sequence: Syntheticoligonucleotide
  source 1..16: mol_type = other DNA
ggtaggtgatgtccat

SEQ ID NO: 2893 - DNA, 16 bp, synthetic construct
  misc_feature 1..16: note = Description of Artificial Sequence: Syntheticoligonucleotide
  source 1..16: mol_type = other DNA
cacagcccccgacttg

SEQ ID NO: 2894 - DNA, 16 bp, synthetic construct
  misc_feature 1..16: note = Description of Artificial Sequence: Syntheticoligonucleotide
  source 1..16: mol_type = other DNA
tagatacattctcaga

SEQ ID NO: 2895 - DNA, 16 bp, synthetic construct
  misc_feature 1..16: note = Description of Artificial Sequence: Syntheticoligonucleotide
  source 1..16: mol_type = other DNA
ggctccgaacaagggc

SEQ ID NO: 2896 - DNA, 16 bp, synthetic construct
  misc_feature 1..16: note = Description of Artificial Sequence: Syntheticoligonucleotide
  source 1..16: mol_type = other DNA
cgtagtcccatagtga

SEQ ID NO: 2897 - DNA, 16 bp, synthetic construct
  misc_feature 1..16: note = Description of Artificial Sequence: Syntheticoligonucleotide
  source 1..16: mol_type = other DNA
acaatggctccgggcc

SEQ ID NO: 2898 - DNA, 16 bp, synthetic construct
  misc_feature 1..16: note = Description of Artificial Sequence: Syntheticoligonucleotide
  source 1..16: mol_type = other DNA
tgtagaagcttctcta

SEQ ID NO: 2899 - DNA, 16 bp, synthetic construct
  misc_feature 1..16: note = Description of Artificial Sequence: Syntheticoligonucleotide
  source 1..16: mol_type = other DNA
tgggttttagcttgag

SEQ ID NO: 2900 - DNA, 16 bp, synthetic construct
  misc_feature 1..16: note = Description of Artificial Sequence: Syntheticoligonucleotide
  source 1..16: mol_type = other DNA
gagtcaaagtgacatg

SEQ ID NO: 2901 - DNA, 16 bp, synthetic construct
  misc_feature 1..16: note = Description of Artificial Sequence: Syntheticoligonucleotide
  source 1..16: mol_type = other DNA
gcagtggagaaggcga

SEQ ID NO: 2902 - DNA, 16 bp, synthetic construct
  misc_feature 1..16: note = Description of Artificial Sequence: Syntheticoligonucleotide
  source 1..16: mol_type = other DNA
tctcggactttctcct

SEQ ID NO: 2903 - DNA, 16 bp, synthetic construct
  misc_feature 1..16: note = Description of Artificial Sequence: Syntheticoligonucleotide
  source 1..16: mol_type = other DNA
gtggacactcctctgg

SEQ ID NO: 2904 - DNA, 16 bp, synthetic construct
  misc_feature 1..16: note = Description of Artificial Sequence: Syntheticoligonucleotide
  source 1..16: mol_type = other DNA
cccagtgccacagtaa

SEQ ID NO: 2905 - DNA, 16 bp, synthetic construct
  misc_feature 1..16: note = Description of Artificial Sequence: Syntheticoligonucleotide
  source 1..16: mol_type = other DNA
cctcccgcccagtgcc

SEQ ID NO: 2906 - DNA, 16 bp, synthetic construct
  misc_feature 1..16: note = Description of Artificial Sequence: Syntheticoligonucleotide
  source 1..16: mol_type = other DNA
agctatgctcatggga

SEQ ID NO: 2907 - DNA, 16 bp, synthetic construct
  misc_feature 1..16: note = Description of Artificial Sequence: Syntheticoligonucleotide
  source 1..16: mol_type = other DNA
ctcacctacttggccc

SEQ ID NO: 2908 - DNA, 16 bp, synthetic construct
  misc_feature 1..16: note = Description of Artificial Sequence: Syntheticoligonucleotide
  source 1..16: mol_type = other DNA
atgatcatcccccttt

SEQ ID NO: 2909 - DNA, 16 bp, synthetic construct
  misc_feature 1..16: note = Description of Artificial Sequence: Syntheticoligonucleotide
  source 1..16: mol_type = other DNA
ggtacgggctgaggtg

SEQ ID NO: 2910 - DNA, 16 bp, synthetic construct
  misc_feature 1..16: note = Description of Artificial Sequence: Syntheticoligonucleotide
  source 1..16: mol_type = other DNA
cgttttttggagggtg

SEQ ID NO: 2911 - DNA, 16 bp, synthetic construct
  misc_feature 1..16: note = Description of Artificial Sequence: Syntheticoligonucleotide
  source 1..16: mol_type = other DNA
agctctgtggttttgt

SEQ ID NO: 2912 - DNA, 16 bp, synthetic construct
  misc_feature 1..16: note = Description of Artificial Sequence: Syntheticoligonucleotide
  source 1..16: mol_type = other DNA
ctttgtaaagctctgt

SEQ ID NO: 2913 - DNA, 16 bp, synthetic construct
  misc_feature 1..16: note = Description of Artificial Sequence: Syntheticoligonucleotide
  source 1..16: mol_type = other DNA
cagagaagcttaaaga

SEQ ID NO: 2914 - DNA, 16 bp, synthetic construct
  misc_feature 1..16: note = Description of Artificial Sequence: Syntheticoligonucleotide
  source 1..16: mol_type = other DNA
gaggtcgagagaagct

SEQ ID NO: 2915 - DNA, 16 bp, synthetic construct
  misc_feature 1..16: note = Description of Artificial Sequence: Syntheticoligonucleotide
  source 1..16: mol_type = other DNA
agtggaataaggctgg

SEQ ID NO: 2916 - DNA, 16 bp, synthetic construct
  misc_feature 1..16: note = Description of Artificial Sequence: Syntheticoligonucleotide
  source 1..16: mol_type = other DNA
tgggagttctctcctc

SEQ ID NO: 2917 - DNA, 16 bp, synthetic construct
  misc_feature 1..16: note = Description of Artificial Sequence: Syntheticoligonucleotide
  source 1..16: mol_type = other DNA
gcctggcagtgcctaa

SEQ ID NO: 2918 - DNA, 16 bp, synthetic construct
  misc_feature 1..16: note = Description of Artificial Sequence: Syntheticoligonucleotide
  source 1..16: mol_type = other DNA
cttcctttataccagc

SEQ ID NO: 2919 - DNA, 16 bp, synthetic construct
  misc_feature 1..16: note = Description of Artificial Sequence: Syntheticoligonucleotide
  source 1..16: mol_type = other DNA
ggacctgaatgtgagg

SEQ ID NO: 2920 - DNA, 16 bp, synthetic construct
  misc_feature 1..16: note = Description of Artificial Sequence: Syntheticoligonucleotide
  source 1..16: mol_type = other DNA
ggatcacagtgtttgg

SEQ ID NO: 2921 - DNA, 16 bp, synthetic construct
  misc_feature 1..16: note = Description of Artificial Sequence: Syntheticoligonucleotide
  source 1..16: mol_type = other DNA
caggttacatagctgg

SEQ ID NO: 2922 - DNA, 16 bp, synthetic construct
  misc_feature 1..16: note = Description of Artificial Sequence: Syntheticoligonucleotide
  source 1..16: mol_type = other DNA
ctctgtggtcgccatc

SEQ ID NO: 2923 - DNA, 16 bp, synthetic construct
  misc_feature 1..16: note = Description of Artificial Sequence: Syntheticoligonucleotide
  source 1..16: mol_type = other DNA
tctgtacattcgcatc

SEQ ID NO: 2924 - DNA, 16 bp, synthetic construct
  misc_feature 1..16: note = Description of Artificial Sequence: Syntheticoligonucleotide
  source 1..16: mol_type = other DNA
tcggatgatgcctggg

SEQ ID NO: 2925 - DNA, 16 bp, synthetic construct
  misc_feature 1..16: note = Description of Artificial Sequence: Syntheticoligonucleotide
  source 1..16: mol_type = other DNA
tagctggagtccagag

SEQ ID NO: 2926 - DNA, 16 bp, synthetic construct
  misc_feature 1..16: note = Description of Artificial Sequence: Syntheticoligonucleotide
  source 1..16: mol_type = other DNA
ctcaccgtcaacaccc

SEQ ID NO: 2927 - DNA, 16 bp, synthetic construct
  misc_feature 1..16: note = Description of Artificial Sequence: Syntheticoligonucleotide
  source 1..16: mol_type = other DNA
taggctattttatggg

SEQ ID NO: 2928 - DNA, 16 bp, synthetic construct
  misc_feature 1..16: note = Description of Artificial Sequence: Syntheticoligonucleotide
  source 1..16: mol_type = other DNA
ggatcaaatgggtgtt

SEQ ID NO: 2929 - DNA, 16 bp, synthetic construct
  misc_feature 1..16: note = Description of Artificial Sequence: Syntheticoligonucleotide
  source 1..16: mol_type = other DNA
cagggtttcagttcag

SEQ ID NO: 2930 - DNA, 16 bp, synthetic construct
  misc_feature 1..16: note = Description of Artificial Sequence: Syntheticoligonucleotide
  source 1..16: mol_type = other DNA
aggtggttaggctcag

SEQ ID NO: 2931 - DNA, 16 bp, synthetic construct
  misc_feature 1..16: note = Description of Artificial Sequence: Syntheticoligonucleotide
  source 1..16: mol_type = other DNA
tgacttggctttaggt

SEQ ID NO: 2932 - DNA, 16 bp, synthetic construct
  misc_feature 1..16: note = Description of Artificial Sequence: Syntheticoligonucleotide
  source 1..16: mol_type = other DNA
atgacctaccccgagc

SEQ ID NO: 2933 - DNA, 16 bp, synthetic construct
  misc_feature 1..16: note = Description of Artificial Sequence: Syntheticoligonucleotide
  source 1..16: mol_type = other DNA
aagtggactgacagaa

SEQ ID NO: 2934 - DNA, 16 bp, synthetic construct
  misc_feature 1..16: note = Description of Artificial Sequence: Syntheticoligonucleotide
  source 1..16: mol_type = other DNA
tggtccgcctggcagt

SEQ ID NO: 2935 - DNA, 16 bp, synthetic construct
  misc_feature 1..16: note = Description of Artificial Sequence: Syntheticoligonucleotide
  source 1..16: mol_type = other DNA
tggaggaactctggga

SEQ ID NO: 2936 - DNA, 16 bp, synthetic construct
  misc_feature 1..16: note = Description of Artificial Sequence: Syntheticoligonucleotide
  source 1..16: mol_type = other DNA
tgtccgctgcttctct

SEQ ID NO: 2937 - DNA, 16 bp, synthetic construct
  misc_feature 1..16: note = Description of Artificial Sequence: Syntheticoligonucleotide
  source 1..16: mol_type = other DNA
tgaggttgtttgagtg

SEQ ID NO: 2938 - DNA, 16 bp, synthetic construct
  misc_feature 1..16: note = Description of Artificial Sequence: Syntheticoligonucleotide
  source 1..16: mol_type = other DNA
ttgtgtgatgatgcag

SEQ ID NO: 2939 - DNA, 16 bp, synthetic construct
  misc_feature 1..16: note = Description of Artificial Sequence: Syntheticoligonucleotide
  source 1..16: mol_type = other DNA
tgtgtgattgtgtgat

SEQ ID NO: 2940 - DNA, 16 bp, synthetic construct
  misc_feature 1..16: note = Description of Artificial Sequence: Syntheticoligonucleotide
  source 1..16: mol_type = other DNA
gtgaggtgagtggcag

SEQ ID NO: 2941 - DNA, 16 bp, synthetic construct
  misc_feature 1..16: note = Description of Artificial Sequence: Syntheticoligonucleotide
  source 1..16: mol_type = other DNA
tggatcagggctcagg

SEQ ID NO: 2942 - DNA, 16 bp, synthetic construct
  misc_feature 1..16: note = Description of Artificial Sequence: Syntheticoligonucleotide
  source 1..16: mol_type = other DNA
ccccgccgtgcctacc

SEQ ID NO: 2943 - DNA, 16 bp, synthetic construct
  misc_feature 1..16: note = Description of Artificial Sequence: Syntheticoligonucleotide
  source 1..16: mol_type = other DNA
acatcccactgtacca

SEQ ID NO: 2944 - DNA, 16 bp, synthetic construct
  misc_feature 1..16: note = Description of Artificial Sequence: Syntheticoligonucleotide
  source 1..16: mol_type = other DNA
tatcaattgatgaatt

SEQ ID NO: 2945 - DNA, 16 bp, synthetic construct
  misc_feature 1..16: note = Description of Artificial Sequence: Syntheticoligonucleotide
  source 1..16: mol_type = other DNA
agcatttcaagttgtt

SEQ ID NO: 2946 - DNA, 16 bp, synthetic construct
  misc_feature 1..16: note = Description of Artificial Sequence: Syntheticoligonucleotide
  source 1..16: mol_type = other DNA
tagggtgaacagaact

SEQ ID NO: 2947 - DNA, 16 bp, synthetic construct
  misc_feature 1..16: note = Description of Artificial Sequence: Syntheticoligonucleotide
  source 1..16: mol_type = other DNA
agttcagttaagtgct

SEQ ID NO: 2948 - DNA, 16 bp, synthetic construct
  misc_feature 1..16: note = Description of Artificial Sequence: Syntheticoligonucleotide
  source 1..16: mol_type = other DNA
tgaacaacctgtttgc

SEQ ID NO: 2949 - DNA, 16 bp, synthetic construct
  misc_feature 1..16: note = Description of Artificial Sequence: Syntheticoligonucleotide
  source 1..16: mol_type = other DNA
atgattctaatttggt

SEQ ID NO: 2950 - DNA, 16 bp, synthetic construct
  misc_feature 1..16: note = Description of Artificial Sequence: Syntheticoligonucleotide
  source 1..16: mol_type = other DNA
atcaatcaaagttcat

SEQ ID NO: 2951 - DNA, 16 bp, synthetic construct
  misc_feature 1..16: note = Description of Artificial Sequence: Syntheticoligonucleotide
  source 1..16: mol_type = other DNA
ccccctttgccccagc

SEQ ID NO: 2952 - DNA, 16 bp, synthetic construct
  misc_feature 1..16: note = Description of Artificial Sequence: Syntheticoligonucleotide
  source 1..16: mol_type = other DNA
atgcacgccccctttg

SEQ ID NO: 2953 - DNA, 16 bp, synthetic construct
  misc_feature 1..16: note = Description of Artificial Sequence: Syntheticoligonucleotide
  source 1..16: mol_type = other DNA
ttagcttaagtagagg

SEQ ID NO: 2954 - DNA, 16 bp, synthetic construct
  misc_feature 1..16: note = Description of Artificial Sequence: Syntheticoligonucleotide
  source 1..16: mol_type = other DNA
tggctgatgaaaggtt

SEQ ID NO: 2955 - DNA, 16 bp, synthetic construct
  misc_feature 1..16: note = Description of Artificial Sequence: Syntheticoligonucleotide
  source 1..16: mol_type = other DNA
ttgctatatatgtaat

SEQ ID NO: 2956 - DNA, 16 bp, synthetic construct
  misc_feature 1..16: note = Description of Artificial Sequence: Syntheticoligonucleotide
  source 1..16: mol_type = other DNA
ttgcagtacatatgag

SEQ ID NO: 2957 - DNA, 16 bp, synthetic construct
  misc_feature 1..16: note = Description of Artificial Sequence: Syntheticoligonucleotide
  source 1..16: mol_type = other DNA
tgatcttgggtttatt

SEQ ID NO: 2958 - DNA, 16 bp, synthetic construct
  misc_feature 1..16: note = Description of Artificial Sequence: Syntheticoligonucleotide
  source 1..16: mol_type = other DNA
gagtatggtttaacaa

SEQ ID NO: 2959 - DNA, 16 bp, synthetic construct
  misc_feature 1..16: note = Description of Artificial Sequence: Syntheticoligonucleotide
  source 1..16: mol_type = other DNA
ccctggtataagaaca

SEQ ID NO: 2960 - DNA, 16 bp, synthetic construct
  misc_feature 1..16: note = Description of Artificial Sequence: Syntheticoligonucleotide
  source 1..16: mol_type = other DNA
aagaacatttgctggt

SEQ ID NO: 2961 - DNA, 16 bp, synthetic construct
  misc_feature 1..16: note = Description of Artificial Sequence: Syntheticoligonucleotide
  source 1..16: mol_type = other DNA
ttaggtgtctgcaggg

SEQ ID NO: 2962 - DNA, 16 bp, synthetic construct
  misc_feature 1..16: note = Description of Artificial Sequence: Syntheticoligonucleotide
  source 1..16: mol_type = other DNA
gtggagtagacaaggg

SEQ ID NO: 2963 - DNA, 16 bp, synthetic construct
  misc_feature 1..16: note = Description of Artificial Sequence: Syntheticoligonucleotide
  source 1..16: mol_type = other DNA
ttcaactctgccgctg

SEQ ID NO: 2964 - DNA, 16 bp, synthetic construct
  misc_feature 1..16: note = Description of Artificial Sequence: Syntheticoligonucleotide
  source 1..16: mol_type = other DNA
ccagggtcccacctag

SEQ ID NO: 2965 - DNA, 16 bp, synthetic construct
  misc_feature 1..16: note = Description of Artificial Sequence: Syntheticoligonucleotide
  source 1..16: mol_type = other DNA
acatgcctccatcatc

SEQ ID NO: 2966 - DNA, 16 bp, synthetic construct
  misc_feature 1..16: note = Description of Artificial Sequence: Syntheticoligonucleotide
  source 1..16: mol_type = other DNA
ctgactgacatgcctc

SEQ ID NO: 2967 - DNA, 16 bp, synthetic construct
  misc_feature 1..16: note = Description of Artificial Sequence: Syntheticoligonucleotide
  source 1..16: mol_type = other DNA
atgtgtaggccagtgt

SEQ ID NO: 2968 - DNA, 16 bp, synthetic construct
  misc_feature 1..16: note = Description of Artificial Sequence: Syntheticoligonucleotide
  source 1..16: mol_type = other DNA
tacggtcccaaagtct

SEQ ID NO: 2969 - DNA, 16 bp, synthetic construct
  misc_feature 1..16: note = Description of Artificial Sequence: Syntheticoligonucleotide
  source 1..16: mol_type = other DNA
tggtaggtgatgtcca

SEQ ID NO: 2970 - DNA, 16 bp, synthetic construct
  misc_feature 1..16: note = Description of Artificial Sequence: Syntheticoligonucleotide
  source 1..16: mol_type = other DNA
ggacacagattatgtt

SEQ ID NO: 2971 - DNA, 16 bp, synthetic construct
  misc_feature 1..16: note = Description of Artificial Sequence: Syntheticoligonucleotide
  source 1..16: mol_type = other DNA
atagatacattctcag

SEQ ID NO: 2972 - DNA, 16 bp, synthetic construct
  misc_feature 1..16: note = Description of Artificial Sequence: Syntheticoligonucleotide
  source 1..16: mol_type = other DNA
aggctccgaacaaggg

SEQ ID NO: 2973 - DNA, 16 bp, synthetic construct
  misc_feature 1..16: note = Description of Artificial Sequence: Syntheticoligonucleotide
  source 1..16: mol_type = other DNA
gatcctataatcctgg

SEQ ID NO: 2974 - DNA, 16 bp, synthetic construct
  misc_feature 1..16: note = Description of Artificial Sequence: Syntheticoligonucleotide
  source 1..16: mol_type = other DNA
cacaatggctccgggc

SEQ ID NO: 2975 - DNA, 16 bp, synthetic construct
  misc_feature 1..16: note = Description of Artificial Sequence: Syntheticoligonucleotide
  source 1..16: mol_type = other DNA
aatatgtgagtggagg

SEQ ID NO: 2976 - DNA, 16 bp, synthetic construct
  misc_feature 1..16: note = Description of Artificial Sequence: Syntheticoligonucleotide
  source 1..16: mol_type = other DNA
acatgggttttagctt

SEQ ID NO: 2977 - DNA, 16 bp, synthetic construct
  misc_feature 1..16: note = Description of Artificial Sequence: Syntheticoligonucleotide
  source 1..16: mol_type = other DNA
gagagtcaaagtgaca

SEQ ID NO: 2978 - DNA, 16 bp, synthetic construct
  misc_feature 1..16: note = Description of Artificial Sequence: Syntheticoligonucleotide
  source 1..16: mol_type = other DNA
aacagtcctggcaagt

SEQ ID NO: 2979 - DNA, 16 bp, synthetic construct
  misc_feature 1..16: note = Description of Artificial Sequence: Syntheticoligonucleotide
  source 1..16: mol_type = other DNA
atcttgccggagctgg

SEQ ID NO: 2980 - DNA, 16 bp, synthetic construct
  misc_feature 1..16: note = Description of Artificial Sequence: Syntheticoligonucleotide
  source 1..16: mol_type = other DNA
cgtggacactcctctg

SEQ ID NO: 2981 - DNA, 16 bp, synthetic construct
  misc_feature 1..16: note = Description of Artificial Sequence: Syntheticoligonucleotide
  source 1..16: mol_type = other DNA
gcccagtgccacagta

SEQ ID NO: 2982 - DNA, 16 bp, synthetic construct
  misc_feature 1..16: note = Description of Artificial Sequence: Syntheticoligonucleotide
  source 1..16: mol_type = other DNA
ccctcccgcccagtgc

SEQ ID NO: 2983 - DNA, 16 bp, synthetic construct
  misc_feature 1..16: note = Description of Artificial Sequence: Syntheticoligonucleotide
  source 1..16: mol_type = other DNA
tagctatgctcatggg

SEQ ID NO: 2984 - DNA, 16 bp, synthetic construct
  misc_feature 1..16: note = Description of Artificial Sequence: Syntheticoligonucleotide
  source 1..16: mol_type = other DNA
cgagtaactttttaaa

SEQ ID NO: 2985 - DNA, 16 bp, synthetic construct
  misc_feature 1..16: note = Description of Artificial Sequence: Syntheticoligonucleotide
  source 1..16: mol_type = other DNA
ctatgatcatccccct

SEQ ID NO: 2986 - DNA, 16 bp, synthetic construct
  misc_feature 1..16: note = Description of Artificial Sequence: Syntheticoligonucleotide
  source 1..16: mol_type = other DNA
agtactgcaattcaga

SEQ ID NO: 2987 - DNA, 16 bp, synthetic construct
  misc_feature 1..16: note = Description of Artificial Sequence: Syntheticoligonucleotide
  source 1..16: mol_type = other DNA
catctttaaggttctg

SEQ ID NO: 2988 - DNA, 16 bp, synthetic construct
  misc_feature 1..16: note = Description of Artificial Sequence: Syntheticoligonucleotide
  source 1..16: mol_type = other DNA
aagctctgtggttttg

SEQ ID NO: 2989 - DNA, 16 bp, synthetic construct
  misc_feature 1..16: note = Description of Artificial Sequence: Syntheticoligonucleotide
  source 1..16: mol_type = other DNA
ttttgactagctttgt

SEQ ID NO: 2990 - DNA, 16 bp, synthetic construct
  misc_feature 1..16: note = Description of Artificial Sequence: Syntheticoligonucleotide
  source 1..16: mol_type = other DNA
gcagagaagcttaaag

SEQ ID NO: 2991 - DNA, 16 bp, synthetic construct
  misc_feature 1..16: note = Description of Artificial Sequence: Syntheticoligonucleotide
  source 1..16: mol_type = other DNA
tgaggtcgagagaagc

SEQ ID NO: 2992 - DNA, 16 bp, synthetic construct
  misc_feature 1..16: note = Description of Artificial Sequence: Syntheticoligonucleotide
  source 1..16: mol_type = other DNA
aacagtggaataaggc

SEQ ID NO: 2993 - DNA, 16 bp, synthetic construct
  misc_feature 1..16: note = Description of Artificial Sequence: Syntheticoligonucleotide
  source 1..16: mol_type = other DNA
ctctgggagttctctc

SEQ ID NO: 2994 - DNA, 16 bp, synthetic construct
  misc_feature 1..16: note = Description of Artificial Sequence: Syntheticoligonucleotide
  source 1..16: mol_type = other DNA
cgcctggcagtgccta

SEQ ID NO: 2995 - DNA, 16 bp, synthetic construct
  misc_feature 1..16: note = Description of Artificial Sequence: Syntheticoligonucleotide
  source 1..16: mol_type = other DNA
ccttcctttataccag

SEQ ID NO: 2996 - DNA, 16 bp, synthetic construct
  misc_feature 1..16: note = Description of Artificial Sequence: Syntheticoligonucleotide
  source 1..16: mol_type = other DNA
tttgtaagtagaaggg

SEQ ID NO: 2997 - DNA, 16 bp, synthetic construct
  misc_feature 1..16: note = Description of Artificial Sequence: Syntheticoligonucleotide
  source 1..16: mol_type = other DNA
aggatcacagtgtttg

SEQ ID NO: 2998 - DNA, 16 bp, synthetic construct
  misc_feature 1..16: note = Description of Artificial Sequence: Syntheticoligonucleotide
  source 1..16: mol_type = other DNA
tcgccatcttgaaatc

SEQ ID NO: 2999 - DNA, 16 bp, synthetic construct
  misc_feature 1..16: note = Description of Artificial Sequence: Syntheticoligonucleotide
  source 1..16: mol_type = other DNA
gctctgtggtcgccat

SEQ ID NO: 3000 - DNA, 16 bp, synthetic construct
  misc_feature 1..16: note = Description of Artificial Sequence: Syntheticoligonucleotide
  source 1..16: mol_type = other DNA
gtcacctaaacccccc

SEQ ID NO: 3001 - DNA, 16 bp, synthetic construct
  misc_feature 1..16: note = Description of Artificial Sequence: Syntheticoligonucleotide
  source 1..16: mol_type = other DNA
ccgtgtagtgcaagga

SEQ ID NO: 3002 - DNA, 16 bp, synthetic construct
  misc_feature 1..16: note = Description of Artificial Sequence: Syntheticoligonucleotide
  source 1..16: mol_type = other DNA
agtagctggagtccag

SEQ ID NO: 3003 - DNA, 16 bp, synthetic construct
  misc_feature 1..16: note = Description of Artificial Sequence: Syntheticoligonucleotide
  source 1..16: mol_type = other DNA
ttggatttgcggacag

SEQ ID NO: 3004 - DNA, 16 bp, synthetic construct
  misc_feature 1..16: note = Description of Artificial Sequence: Syntheticoligonucleotide
  source 1..16: mol_type = other DNA
ggaatggtgcccagtt

SEQ ID NO: 3005 - DNA, 16 bp, synthetic construct
  misc_feature 1..16: note = Description of Artificial Sequence: Syntheticoligonucleotide
  source 1..16: mol_type = other DNA
atctggtatcatgtag

SEQ ID NO: 3006 - DNA, 16 bp, synthetic construct
  misc_feature 1..16: note = Description of Artificial Sequence: Syntheticoligonucleotide
  source 1..16: mol_type = other DNA
aggctatcagtcagga

SEQ ID NO: 3007 - DNA, 16 bp, synthetic construct
  misc_feature 1..16: note = Description of Artificial Sequence: Syntheticoligonucleotide
  source 1..16: mol_type = other DNA
atggttaggtggttag

SEQ ID NO: 3008 - DNA, 16 bp, synthetic construct
  misc_feature 1..16: note = Description of Artificial Sequence: Syntheticoligonucleotide
  source 1..16: mol_type = other DNA
gatgggatgacttggc

SEQ ID NO: 3009 - DNA, 16 bp, synthetic construct
  misc_feature 1..16: note = Description of Artificial Sequence: Syntheticoligonucleotide
  source 1..16: mol_type = other DNA
gctatgacctaccccg

SEQ ID NO: 3010 - DNA, 16 bp, synthetic construct
  misc_feature 1..16: note = Description of Artificial Sequence: Syntheticoligonucleotide
  source 1..16: mol_type = other DNA
gcttggtgaagtggac

SEQ ID NO: 3011 - DNA, 16 bp, synthetic construct
  misc_feature 1..16: note = Description of Artificial Sequence: Syntheticoligonucleotide
  source 1..16: mol_type = other DNA
atggtccgcctggcag

SEQ ID NO: 3012 - DNA, 16 bp, synthetic construct
  misc_feature 1..16: note = Description of Artificial Sequence: Syntheticoligonucleotide
  source 1..16: mol_type = other DNA
tgtggaggaactctgg

SEQ ID NO: 3013 - DNA, 16 bp, synthetic construct
  misc_feature 1..16: note = Description of Artificial Sequence: Syntheticoligonucleotide
  source 1..16: mol_type = other DNA
agtgtccgctgcttct

SEQ ID NO: 3014 - DNA, 16 bp, synthetic construct
  misc_feature 1..16: note = Description of Artificial Sequence: Syntheticoligonucleotide
  source 1..16: mol_type = other DNA
tttgaggttgtttgag

SEQ ID NO: 3015 - DNA, 16 bp, synthetic construct
  misc_feature 1..16: note = Description of Artificial Sequence: Syntheticoligonucleotide
  source 1..16: mol_type = other DNA
attgtgtgatgatgca

SEQ ID NO: 3016 - DNA, 16 bp, synthetic construct
  misc_feature 1..16: note = Description of Artificial Sequence: Syntheticoligonucleotide
  source 1..16: mol_type = other DNA
atcctgagggtactga

SEQ ID NO: 3017 - DNA, 16 bp, synthetic construct
  misc_feature 1..16: note = Description of Artificial Sequence: Syntheticoligonucleotide
  source 1..16: mol_type = other DNA
agtgaggtgagtggca

SEQ ID NO: 3018 - DNA, 16 bp, synthetic construct
  misc_feature 1..16: note = Description of Artificial Sequence: Syntheticoligonucleotide
  source 1..16: mol_type = other DNA
cgtgcctacctccctg

SEQ ID NO: 3019 - DNA, 16 bp, synthetic construct
  misc_feature 1..16: note = Description of Artificial Sequence: Syntheticoligonucleotide
  source 1..16: mol_type = other DNA
cccccgccgtgcctac

SEQ ID NO: 3020 - DNA, 16 bp, synthetic construct
  misc_feature 1..16: note = Description of Artificial Sequence: Syntheticoligonucleotide
  source 1..16: mol_type = other DNA
gggtacatcccactgt

SEQ ID NO: 3021 - DNA, 16 bp, synthetic construct
  misc_feature 1..16: note = Description of Artificial Sequence: Syntheticoligonucleotide
  source 1..16: mol_type = other DNA
gtatcaattgatgaat

SEQ ID NO: 3022 - DNA, 16 bp, synthetic construct
  misc_feature 1..16: note = Description of Artificial Sequence: Syntheticoligonucleotide
  source 1..16: mol_type = other DNA
cagcatttcaagttgt

SEQ ID NO: 3023 - DNA, 16 bp, synthetic construct
  misc_feature 1..16: note = Description of Artificial Sequence: Syntheticoligonucleotide
  source 1..16: mol_type = other DNA
ctgctactagggtgaa

SEQ ID NO: 3024 - DNA, 16 bp, synthetic construct
  misc_feature 1..16: note = Description of Artificial Sequence: Syntheticoligonucleotide
  source 1..16: mol_type = other DNA
aagttcagttaagtgc

SEQ ID NO: 3025 - DNA, 16 bp, synthetic construct
  misc_feature 1..16: note = Description of Artificial Sequence: Syntheticoligonucleotide
  source 1..16: mol_type = other DNA
tactttgtgccaaacg

SEQ ID NO: 3026 - DNA, 16 bp, synthetic construct
  misc_feature 1..16: note = Description of Artificial Sequence: Syntheticoligonucleotide
  source 1..16: mol_type = other DNA
agcatgattctaattt

SEQ ID NO: 3027 - DNA, 16 bp, synthetic construct
  misc_feature 1..16: note = Description of Artificial Sequence: Syntheticoligonucleotide
  source 1..16: mol_type = other DNA
aatcaatcaaagttca

SEQ ID NO: 3028 - DNA, 16 bp, synthetic construct
  misc_feature 1..16: note = Description of Artificial Sequence: Syntheticoligonucleotide
  source 1..16: mol_type = other DNA
gccccctttgccccag

SEQ ID NO: 3029 - DNA, 16 bp, synthetic construct
  misc_feature 1..16: note = Description of Artificial Sequence: Syntheticoligonucleotide
  source 1..16: mol_type = other DNA
aatgcacgcccccttt

SEQ ID NO: 3030 - DNA, 16 bp, synthetic construct
  misc_feature 1..16: note = Description of Artificial Sequence: Syntheticoligonucleotide
  source 1..16: mol_type = other DNA
agggttagcttaagta

SEQ ID NO: 3031 - DNA, 16 bp, synthetic construct
  misc_feature 1..16: note = Description of Artificial Sequence: Syntheticoligonucleotide
  source 1..16: mol_type = other DNA
aatggctgatgaaagg

SEQ ID NO: 3032 - DNA, 16 bp, synthetic construct
  misc_feature 1..16: note = Description of Artificial Sequence: Syntheticoligonucleotide
  source 1..16: mol_type = other DNA
gcaaatgatgaattgg

SEQ ID NO: 3033 - DNA, 16 bp, synthetic construct
  misc_feature 1..16: note = Description of Artificial Sequence: Syntheticoligonucleotide
  source 1..16: mol_type = other DNA
attgcagtacatatga

SEQ ID NO: 3034 - DNA, 16 bp, synthetic construct
  misc_feature 1..16: note = Description of Artificial Sequence: Syntheticoligonucleotide
  source 1..16: mol_type = other DNA
tgctgatcttgggttt

SEQ ID NO: 3035 - DNA, 16 bp, synthetic construct
  misc_feature 1..16: note = Description of Artificial Sequence: Syntheticoligonucleotide
  source 1..16: mol_type = other DNA
atggagtatggtttaa

SEQ ID NO: 3036 - DNA, 16 bp, synthetic construct
  misc_feature 1..16: note = Description of Artificial Sequence: Syntheticoligonucleotide
  source 1..16: mol_type = other DNA
agggacacccatggct

SEQ ID NO: 3037 - DNA, 16 bp, synthetic construct
  misc_feature 1..16: note = Description of Artificial Sequence: Syntheticoligonucleotide
  source 1..16: mol_type = other DNA
taagaacatttgctgg

SEQ ID NO: 3038 - DNA, 16 bp, synthetic construct
  misc_feature 1..16: note = Description of Artificial Sequence: Syntheticoligonucleotide
  source 1..16: mol_type = other DNA
taagtcattaggtgtc

SEQ ID NO: 3039 - DNA, 16 bp, synthetic construct
  misc_feature 1..16: note = Description of Artificial Sequence: Syntheticoligonucleotide
  source 1..16: mol_type = other DNA
ttctacactgagcacg

SEQ ID NO: 3040 - DNA, 16 bp, synthetic construct
  misc_feature 1..16: note = Description of Artificial Sequence: Syntheticoligonucleotide
  source 1..16: mol_type = other DNA
tttcaactctgccgct

SEQ ID NO: 3041 - DNA, 16 bp, synthetic construct
  misc_feature 1..16: note = Description of Artificial Sequence: Syntheticoligonucleotide
  source 1..16: mol_type = other DNA
accagggtcccaccta

SEQ ID NO: 3042 - DNA, 16 bp, synthetic construct
  misc_feature 1..16: note = Description of Artificial Sequence: Syntheticoligonucleotide
  source 1..16: mol_type = other DNA
gacatgcctccatcat

SEQ ID NO: 3043 - DNA, 16 bp, synthetic construct
  misc_feature 1..16: note = Description of Artificial Sequence: Syntheticoligonucleotide
  source 1..16: mol_type = other DNA
actgactgacatgcct

SEQ ID NO: 3044 - DNA, 16 bp, synthetic construct
  misc_feature 1..16: note = Description of Artificial Sequence: Syntheticoligonucleotide
  source 1..16: mol_type = other DNA
tatgtgtaggccagtg

SEQ ID NO: 3045 - DNA, 16 bp, synthetic construct
  misc_feature 1..16: note = Description of Artificial Sequence: Syntheticoligonucleotide
  source 1..16: mol_type = other DNA
tgaagacctggccctt

SEQ ID NO: 3046 - DNA, 16 bp, synthetic construct
  misc_feature 1..16: note = Description of Artificial Sequence: Syntheticoligonucleotide
  source 1..16: mol_type = other DNA
atgtggtaggtgatgt

SEQ ID NO: 3047 - DNA, 16 bp, synthetic construct
  misc_feature 1..16: note = Description of Artificial Sequence: Syntheticoligonucleotide
  source 1..16: mol_type = other DNA
aggacctagagggccg

SEQ ID NO: 3048 - DNA, 16 bp, synthetic construct
  misc_feature 1..16: note = Description of Artificial Sequence: Syntheticoligonucleotide
  source 1..16: mol_type = other DNA
aaagcatagatacatt

SEQ ID NO: 3049 - DNA, 16 bp, synthetic construct
  misc_feature 1..16: note = Description of Artificial Sequence: Syntheticoligonucleotide
  source 1..16: mol_type = other DNA
gaggctccgaacaagg

SEQ ID NO: 3050 - DNA, 16 bp, synthetic construct
  misc_feature 1..16: note = Description of Artificial Sequence: Syntheticoligonucleotide
  source 1..16: mol_type = other DNA
ggatcctataatcctg

SEQ ID NO: 3051 - DNA, 16 bp, synthetic construct
  misc_feature 1..16: note = Description of Artificial Sequence: Syntheticoligonucleotide
  source 1..16: mol_type = other DNA
tccacaatggctccgg

SEQ ID NO: 3052 - DNA, 16 bp, synthetic construct
  misc_feature 1..16: note = Description of Artificial Sequence: Syntheticoligonucleotide
  source 1..16: mol_type = other DNA
gtgtagatagacatga

SEQ ID NO: 3053 - DNA, 16 bp, synthetic construct
  misc_feature 1..16: note = Description of Artificial Sequence: Syntheticoligonucleotide
  source 1..16: mol_type = other DNA
gacatgggttttagct

SEQ ID NO: 3054 - DNA, 16 bp, synthetic construct
  misc_feature 1..16: note = Description of Artificial Sequence: Syntheticoligonucleotide
  source 1..16: mol_type = other DNA
ggagagtcaaagtgac

SEQ ID NO: 3055 - DNA, 16 bp, synthetic construct
  misc_feature 1..16: note = Description of Artificial Sequence: Syntheticoligonucleotide
  source 1..16: mol_type = other DNA
tattttgccccagtga

SEQ ID NO: 3056 - DNA, 16 bp, synthetic construct
  misc_feature 1..16: note = Description of Artificial Sequence: Syntheticoligonucleotide
  source 1..16: mol_type = other DNA
gcaatggttgtttccc

SEQ ID NO: 3057 - DNA, 16 bp, synthetic construct
  misc_feature 1..16: note = Description of Artificial Sequence: Syntheticoligonucleotide
  source 1..16: mol_type = other DNA
gagatactcgaccacc

SEQ ID NO: 3058 - DNA, 16 bp, synthetic construct
  misc_feature 1..16: note = Description of Artificial Sequence: Syntheticoligonucleotide
  source 1..16: mol_type = other DNA
cgcccagtgccacagt

SEQ ID NO: 3059 - DNA, 16 bp, synthetic construct
  misc_feature 1..16: note = Description of Artificial Sequence: Syntheticoligonucleotide
  source 1..16: mol_type = other DNA
ggattttcttggccct

SEQ ID NO: 3060 - DNA, 16 bp, synthetic construct
  misc_feature 1..16: note = Description of Artificial Sequence: Syntheticoligonucleotide
  source 1..16: mol_type = other DNA
catagctatgctcatg

SEQ ID NO: 3061 - DNA, 16 bp, synthetic construct
  misc_feature 1..16: note = Description of Artificial Sequence: Syntheticoligonucleotide
  source 1..16: mol_type = other DNA
catggagatcgagtaa

SEQ ID NO: 3062 - DNA, 16 bp, synthetic construct
  misc_feature 1..16: note = Description of Artificial Sequence: Syntheticoligonucleotide
  source 1..16: mol_type = other DNA
agatgctatgatcatc

SEQ ID NO: 3063 - DNA, 16 bp, synthetic construct
  misc_feature 1..16: note = Description of Artificial Sequence: Syntheticoligonucleotide
  source 1..16: mol_type = other DNA
acctttgacccccaga

SEQ ID NO: 3064 - DNA, 16 bp, synthetic construct
  misc_feature 1..16: note = Description of Artificial Sequence: Syntheticoligonucleotide
  source 1..16: mol_type = other DNA
tctgcatctttaaggt

SEQ ID NO: 3065 - DNA, 16 bp, synthetic construct
  misc_feature 1..16: note = Description of Artificial Sequence: Syntheticoligonucleotide
  source 1..16: mol_type = other DNA
aaagctctgtggtttt

SEQ ID NO: 3066 - DNA, 16 bp, synthetic construct
  misc_feature 1..16: note = Description of Artificial Sequence: Syntheticoligonucleotide
  source 1..16: mol_type = other DNA
cattttgactagcttt

SEQ ID NO: 3067 - DNA, 16 bp, synthetic construct
  misc_feature 1..16: note = Description of Artificial Sequence: Syntheticoligonucleotide
  source 1..16: mol_type = other DNA
acagggcacctatgga

SEQ ID NO: 3068 - DNA, 16 bp, synthetic construct
  misc_feature 1..16: note = Description of Artificial Sequence: Syntheticoligonucleotide
  source 1..16: mol_type = other DNA
cgtttcttattataca

SEQ ID NO: 3069 - DNA, 16 bp, synthetic construct
  misc_feature 1..16: note = Description of Artificial Sequence: Syntheticoligonucleotide
  source 1..16: mol_type = other DNA
ctttgggaacagtgga

SEQ ID NO: 3070 - DNA, 16 bp, synthetic construct
  misc_feature 1..16: note = Description of Artificial Sequence: Syntheticoligonucleotide
  source 1..16: mol_type = other DNA
ccctctgggagttctc

SEQ ID NO: 3071 - DNA, 16 bp, synthetic construct
  misc_feature 1..16: note = Description of Artificial Sequence: Syntheticoligonucleotide
  source 1..16: mol_type = other DNA
ccgcctggcagtgcct

SEQ ID NO: 3072 - DNA, 16 bp, synthetic construct
  misc_feature 1..16: note = Description of Artificial Sequence: Syntheticoligonucleotide
  source 1..16: mol_type = other DNA
tccttcctttatacca

SEQ ID NO: 3073 - DNA, 16 bp, synthetic construct
  misc_feature 1..16: note = Description of Artificial Sequence: Syntheticoligonucleotide
  source 1..16: mol_type = other DNA
gagggtttgtaagtag

SEQ ID NO: 3074 - DNA, 16 bp, synthetic construct
  misc_feature 1..16: note = Description of Artificial Sequence: Syntheticoligonucleotide
  source 1..16: mol_type = other DNA
caggatcacagtgttt

SEQ ID NO: 3075 - DNA, 16 bp, synthetic construct
  misc_feature 1..16: note = Description of Artificial Sequence: Syntheticoligonucleotide
  source 1..16: mol_type = other DNA
gtcgccatcttgaaat

SEQ ID NO: 3076 - DNA, 16 bp, synthetic construct
  misc_feature 1..16: note = Description of Artificial Sequence: Syntheticoligonucleotide
  source 1..16: mol_type = other DNA
tgctctgtggtcgcca

SEQ ID NO: 3077 - DNA, 16 bp, synthetic construct
  misc_feature 1..16: note = Description of Artificial Sequence: Syntheticoligonucleotide
  source 1..16: mol_type = other DNA
accacccaactgtgac

SEQ ID NO: 3078 - DNA, 16 bp, synthetic construct
  misc_feature 1..16: note = Description of Artificial Sequence: Syntheticoligonucleotide
  source 1..16: mol_type = other DNA
tgagtggcggcagctg

SEQ ID NO: 3079 - DNA, 16 bp, synthetic construct
  misc_feature 1..16: note = Description of Artificial Sequence: Syntheticoligonucleotide
  source 1..16: mol_type = other DNA
atagtagctggagtcc

SEQ ID NO: 3080 - DNA, 16 bp, synthetic construct
  misc_feature 1..16: note = Description of Artificial Sequence: Syntheticoligonucleotide
  source 1..16: mol_type = other DNA
tggtggtttaggtttg

SEQ ID NO: 3081 - DNA, 16 bp, synthetic construct
  misc_feature 1..16: note = Description of Artificial Sequence: Syntheticoligonucleotide
  source 1..16: mol_type = other DNA
acaaggaaaggttggg

SEQ ID NO: 3082 - DNA, 16 bp, synthetic construct
  misc_feature 1..16: note = Description of Artificial Sequence: Syntheticoligonucleotide
  source 1..16: mol_type = other DNA
tatctggtatcatgta

SEQ ID NO: 3083 - DNA, 16 bp, synthetic construct
  misc_feature 1..16: note = Description of Artificial Sequence: Syntheticoligonucleotide
  source 1..16: mol_type = other DNA
gaggctatcagtcagg

SEQ ID NO: 3084 - DNA, 16 bp, synthetic construct
  misc_feature 1..16: note = Description of Artificial Sequence: Syntheticoligonucleotide
  source 1..16: mol_type = other DNA
acatggttaggtggtt

SEQ ID NO: 3085 - DNA, 16 bp, synthetic construct
  misc_feature 1..16: note = Description of Artificial Sequence: Syntheticoligonucleotide
  source 1..16: mol_type = other DNA
ggtgaagtgtcgggtt

SEQ ID NO: 3086 - DNA, 16 bp, synthetic construct
  misc_feature 1..16: note = Description of Artificial Sequence: Syntheticoligonucleotide
  source 1..16: mol_type = other DNA
ggctatgacctacccc

SEQ ID NO: 3087 - DNA, 16 bp, synthetic construct
  misc_feature 1..16: note = Description of Artificial Sequence: Syntheticoligonucleotide
  source 1..16: mol_type = other DNA
ggccccgcctcgaaga

SEQ ID NO: 3088 - DNA, 16 bp, synthetic construct
  misc_feature 1..16: note = Description of Artificial Sequence: Syntheticoligonucleotide
  source 1..16: mol_type = other DNA
ggaactctgggaatgt

SEQ ID NO: 3089 - DNA, 16 bp, synthetic construct
  misc_feature 1..16: note = Description of Artificial Sequence: Syntheticoligonucleotide
  source 1..16: mol_type = other DNA
ttgtggaggaactctg

SEQ ID NO: 3090 - DNA, 16 bp, synthetic construct
  misc_feature 1..16: note = Description of Artificial Sequence: Syntheticoligonucleotide
  source 1..16: mol_type = other DNA
tgagtgtccgctgctt

SEQ ID NO: 3091 - DNA, 16 bp, synthetic construct
  misc_feature 1..16: note = Description of Artificial Sequence: Syntheticoligonucleotide
  source 1..16: mol_type = other DNA
ctttgaggttgtttga

SEQ ID NO: 3092 - DNA, 16 bp, synthetic construct
  misc_feature 1..16: note = Description of Artificial Sequence: Syntheticoligonucleotide
  source 1..16: mol_type = other DNA
gattgtgtgatgatgc

SEQ ID NO: 3093 - DNA, 16 bp, synthetic construct
  misc_feature 1..16: note = Description of Artificial Sequence: Syntheticoligonucleotide
  source 1..16: mol_type = other DNA
gatcctgagggtactg

SEQ ID NO: 3094 - DNA, 16 bp, synthetic construct
  misc_feature 1..16: note = Description of Artificial Sequence: Syntheticoligonucleotide
  source 1..16: mol_type = other DNA
ggagtgaggtgagtgg

SEQ ID NO: 3095 - DNA, 16 bp, synthetic construct
  misc_feature 1..16: note = Description of Artificial Sequence: Syntheticoligonucleotide
  source 1..16: mol_type = other DNA
ccgtgcctacctccct

SEQ ID NO: 3096 - DNA, 16 bp, synthetic construct
  misc_feature 1..16: note = Description of Artificial Sequence: Syntheticoligonucleotide
  source 1..16: mol_type = other DNA
ccccccgccgtgccta

SEQ ID NO: 3097 - DNA, 16 bp, synthetic construct
  misc_feature 1..16: note = Description of Artificial Sequence: Syntheticoligonucleotide
  source 1..16: mol_type = other DNA
ctgggtacatcccact

SEQ ID NO: 3098 - DNA, 16 bp, synthetic construct
  misc_feature 1..16: note = Description of Artificial Sequence: Syntheticoligonucleotide
  source 1..16: mol_type = other DNA
tcaagttgttcaaagc

SEQ ID NO: 3099 - DNA, 16 bp, synthetic construct
  misc_feature 1..16: note = Description of Artificial Sequence: Syntheticoligonucleotide
  source 1..16: mol_type = other DNA
gcaagacagggtgagc

SEQ ID NO: 3100 - DNA, 16 bp, synthetic construct
  misc_feature 1..16: note = Description of Artificial Sequence: Syntheticoligonucleotide
  source 1..16: mol_type = other DNA
ttgcaatcctcctgct

SEQ ID NO: 3101 - DNA, 16 bp, synthetic construct
  misc_feature 1..16: note = Description of Artificial Sequence: Syntheticoligonucleotide
  source 1..16: mol_type = other DNA
aaagttcagttaagtg

SEQ ID NO: 3102 - DNA, 16 bp, synthetic construct
  misc_feature 1..16: note = Description of Artificial Sequence: Syntheticoligonucleotide
  source 1..16: mol_type = other DNA
ggttacagaaatacta

SEQ ID NO: 3103 - DNA, 16 bp, synthetic construct
  misc_feature 1..16: note = Description of Artificial Sequence: Syntheticoligonucleotide
  source 1..16: mol_type = other DNA
tagcatgattctaatt

SEQ ID NO: 3104 - DNA, 16 bp, synthetic construct
  misc_feature 1..16: note = Description of Artificial Sequence: Syntheticoligonucleotide
  source 1..16: mol_type = other DNA
aaatcaatcaaagttc

SEQ ID NO: 3105 - DNA, 16 bp, synthetic construct
  misc_feature 1..16: note = Description of Artificial Sequence: Syntheticoligonucleotide
  source 1..16: mol_type = other DNA
cgccccctttgcccca

SEQ ID NO: 3106 - DNA, 16 bp, synthetic construct
  misc_feature 1..16: note = Description of Artificial Sequence: Syntheticoligonucleotide
  source 1..16: mol_type = other DNA
gagggtcataaacttt

SEQ ID NO: 3107 - DNA, 16 bp, synthetic construct
  misc_feature 1..16: note = Description of Artificial Sequence: Syntheticoligonucleotide
  source 1..16: mol_type = other DNA
ctcacctagggttagc

SEQ ID NO: 3108 - DNA, 16 bp, synthetic construct
  misc_feature 1..16: note = Description of Artificial Sequence: Syntheticoligonucleotide
  source 1..16: mol_type = other DNA
taatggctgatgaaag

SEQ ID NO: 3109 - DNA, 16 bp, synthetic construct
  misc_feature 1..16: note = Description of Artificial Sequence: Syntheticoligonucleotide
  source 1..16: mol_type = other DNA
gactgtataaaaccat

SEQ ID NO: 3110 - DNA, 16 bp, synthetic construct
  misc_feature 1..16: note = Description of Artificial Sequence: Syntheticoligonucleotide
  source 1..16: mol_type = other DNA
ccattgcagtacatat

SEQ ID NO: 3111 - DNA, 16 bp, synthetic construct
  misc_feature 1..16: note = Description of Artificial Sequence: Syntheticoligonucleotide
  source 1..16: mol_type = other DNA
atgctgatcttgggtt

SEQ ID NO: 3112 - DNA, 16 bp, synthetic construct
  misc_feature 1..16: note = Description of Artificial Sequence: Syntheticoligonucleotide
  source 1..16: mol_type = other DNA
accatggagtatggtt

SEQ ID NO: 3113 - DNA, 16 bp, synthetic construct
  misc_feature 1..16: note = Description of Artificial Sequence: Syntheticoligonucleotide
  source 1..16: mol_type = other DNA
ttgctggtctctggct

SEQ ID NO: 3114 - DNA, 16 bp, synthetic construct
  misc_feature 1..16: note = Description of Artificial Sequence: Syntheticoligonucleotide
  source 1..16: mol_type = other DNA
atgcatggagagccag

SEQ ID NO: 3115 - DNA, 16 bp, synthetic construct
  misc_feature 1..16: note = Description of Artificial Sequence: Syntheticoligonucleotide
  source 1..16: mol_type = other DNA
tacgctgtctggttaa

SEQ ID NO: 3116 - DNA, 16 bp, synthetic construct
  misc_feature 1..16: note = Description of Artificial Sequence: Syntheticoligonucleotide
  source 1..16: mol_type = other DNA
ttcggtgaggccctga

SEQ ID NO: 3117 - DNA, 16 bp, synthetic construct
  misc_feature 1..16: note = Description of Artificial Sequence: Syntheticoligonucleotide
  source 1..16: mol_type = other DNA
atttcaactctgccgc

SEQ ID NO: 3118 - DNA, 16 bp, synthetic construct
  misc_feature 1..16: note = Description of Artificial Sequence: Syntheticoligonucleotide
  source 1..16: mol_type = other DNA
aatggtagcccaggtt

SEQ ID NO: 3119 - DNA, 16 bp, synthetic construct
  misc_feature 1..16: note = Description of Artificial Sequence: Syntheticoligonucleotide
  source 1..16: mol_type = other DNA
tgacatgcctccatca

SEQ ID NO: 3120 - DNA, 16 bp, synthetic construct
  misc_feature 1..16: note = Description of Artificial Sequence: Syntheticoligonucleotide
  source 1..16: mol_type = other DNA
acaatcaaggttttcg

SEQ ID NO: 3121 - DNA, 16 bp, synthetic construct
  misc_feature 1..16: note = Description of Artificial Sequence: Syntheticoligonucleotide
  source 1..16: mol_type = other DNA
cagtatgtgtaggcca

SEQ ID NO: 3122 - DNA, 16 bp, synthetic construct
  misc_feature 1..16: note = Description of Artificial Sequence: Syntheticoligonucleotide
  source 1..16: mol_type = other DNA
agctctgaagacctgg

SEQ ID NO: 3123 - DNA, 16 bp, synthetic construct
  misc_feature 1..16: note = Description of Artificial Sequence: Syntheticoligonucleotide
  source 1..16: mol_type = other DNA
ccgacttgcccagatt

SEQ ID NO: 3124 - DNA, 16 bp, synthetic construct
  misc_feature 1..16: note = Description of Artificial Sequence: Syntheticoligonucleotide
  source 1..16: mol_type = other DNA
ggacatggagatgatc

SEQ ID NO: 3125 - DNA, 16 bp, synthetic construct
  misc_feature 1..16: note = Description of Artificial Sequence: Syntheticoligonucleotide
  source 1..16: mol_type = other DNA
caaagcatagatacat

SEQ ID NO: 3126 - DNA, 16 bp, synthetic construct
  misc_feature 1..16: note = Description of Artificial Sequence: Syntheticoligonucleotide
  source 1..16: mol_type = other DNA
tctgtggaggctccga

SEQ ID NO: 3127 - DNA, 16 bp, synthetic construct
  misc_feature 1..16: note = Description of Artificial Sequence: Syntheticoligonucleotide
  source 1..16: mol_type = other DNA
tcaggatcctataatc

SEQ ID NO: 3128 - DNA, 16 bp, synthetic construct
  misc_feature 1..16: note = Description of Artificial Sequence: Syntheticoligonucleotide
  source 1..16: mol_type = other DNA
ctccacaatggctccg

SEQ ID NO: 3129 - DNA, 16 bp, synthetic construct
  misc_feature 1..16: note = Description of Artificial Sequence: Syntheticoligonucleotide
  source 1..16: mol_type = other DNA
aggtgtagatagacat

SEQ ID NO: 3130 - DNA, 16 bp, synthetic construct
  misc_feature 1..16: note = Description of Artificial Sequence: Syntheticoligonucleotide
  source 1..16: mol_type = other DNA
tgacatgggttttagc

SEQ ID NO: 3131 - DNA, 16 bp, synthetic construct
  misc_feature 1..16: note = Description of Artificial Sequence: Syntheticoligonucleotide
  source 1..16: mol_type = other DNA
gatgtagtgggcaaga

SEQ ID NO: 3132 - DNA, 16 bp, synthetic construct
  misc_feature 1..16: note = Description of Artificial Sequence: Syntheticoligonucleotide
  source 1..16: mol_type = other DNA
ggagtcctattttgcc

SEQ ID NO: 3133 - DNA, 16 bp, synthetic construct
  misc_feature 1..16: note = Description of Artificial Sequence: Syntheticoligonucleotide
  source 1..16: mol_type = other DNA
aggtacatgtacatac

SEQ ID NO: 3134 - DNA, 16 bp, synthetic construct
  misc_feature 1..16: note = Description of Artificial Sequence: Syntheticoligonucleotide
  source 1..16: mol_type = other DNA
cggtatgagatactcg

SEQ ID NO: 3135 - DNA, 16 bp, synthetic construct
  misc_feature 1..16: note = Description of Artificial Sequence: Syntheticoligonucleotide
  source 1..16: mol_type = other DNA
ccgcccagtgccacag

SEQ ID NO: 3136 - DNA, 16 bp, synthetic construct
  misc_feature 1..16: note = Description of Artificial Sequence: Syntheticoligonucleotide
  source 1..16: mol_type = other DNA
gggactacaatacggc

SEQ ID NO: 3137 - DNA, 16 bp, synthetic construct
  misc_feature 1..16: note = Description of Artificial Sequence: Syntheticoligonucleotide
  source 1..16: mol_type = other DNA
cacatagctatgctca

SEQ ID NO: 3138 - DNA, 16 bp, synthetic construct
  misc_feature 1..16: note = Description of Artificial Sequence: Syntheticoligonucleotide
  source 1..16: mol_type = other DNA
tcatggagatcgagta

SEQ ID NO: 3139 - DNA, 16 bp, synthetic construct
  misc_feature 1..16: note = Description of Artificial Sequence: Syntheticoligonucleotide
  source 1..16: mol_type = other DNA
tagatgctatgatcat

SEQ ID NO: 3140 - DNA, 16 bp, synthetic construct
  misc_feature 1..16: note = Description of Artificial Sequence: Syntheticoligonucleotide
  source 1..16: mol_type = other DNA
cacctttgacccccag

SEQ ID NO: 3141 - DNA, 16 bp, synthetic construct
  misc_feature 1..16: note = Description of Artificial Sequence: Syntheticoligonucleotide
  source 1..16: mol_type = other DNA
ttctgcatctttaagg

SEQ ID NO: 3142 - DNA, 16 bp, synthetic construct
  misc_feature 1..16: note = Description of Artificial Sequence: Syntheticoligonucleotide
  source 1..16: mol_type = other DNA
taaagctctgtggttt

SEQ ID NO: 3143 - DNA, 16 bp, synthetic construct
  misc_feature 1..16: note = Description of Artificial Sequence: Syntheticoligonucleotide
  source 1..16: mol_type = other DNA
tgctgacattttgact

SEQ ID NO: 3144 - DNA, 16 bp, synthetic construct
  misc_feature 1..16: note = Description of Artificial Sequence: Syntheticoligonucleotide
  source 1..16: mol_type = other DNA
ccggtagactggcaca

SEQ ID NO: 3145 - DNA, 16 bp, synthetic construct
  misc_feature 1..16: note = Description of Artificial Sequence: Syntheticoligonucleotide
  source 1..16: mol_type = other DNA
ggctacatgggttcaa

SEQ ID NO: 3146 - DNA, 16 bp, synthetic construct
  misc_feature 1..16: note = Description of Artificial Sequence: Syntheticoligonucleotide
  source 1..16: mol_type = other DNA
aagcattctgggtgga

SEQ ID NO: 3147 - DNA, 16 bp, synthetic construct
  misc_feature 1..16: note = Description of Artificial Sequence: Syntheticoligonucleotide
  source 1..16: mol_type = other DNA
tgcaggtgaccacgac

SEQ ID NO: 3148 - DNA, 16 bp, synthetic construct
  misc_feature 1..16: note = Description of Artificial Sequence: Syntheticoligonucleotide
  source 1..16: mol_type = other DNA
cagaaggttttgcgca

SEQ ID NO: 3149 - DNA, 16 bp, synthetic construct
  misc_feature 1..16: note = Description of Artificial Sequence: Syntheticoligonucleotide
  source 1..16: mol_type = other DNA
aatgtgaggttaggtt

SEQ ID NO: 3150 - DNA, 16 bp, synthetic construct
  misc_feature 1..16: note = Description of Artificial Sequence: Syntheticoligonucleotide
  source 1..16: mol_type = other DNA
ttagagtcagagggtt

SEQ ID NO: 3151 - DNA, 16 bp, synthetic construct
  misc_feature 1..16: note = Description of Artificial Sequence: Syntheticoligonucleotide
  source 1..16: mol_type = other DNA
aactcaggatcacagt

SEQ ID NO: 3152 - DNA, 16 bp, synthetic construct
  misc_feature 1..16: note = Description of Artificial Sequence: Syntheticoligonucleotide
  source 1..16: mol_type = other DNA
ggtcgccatcttgaaa

SEQ ID NO: 3153 - DNA, 16 bp, synthetic construct
  misc_feature 1..16: note = Description of Artificial Sequence: Syntheticoligonucleotide
  source 1..16: mol_type = other DNA
acctatgtggttatgt

SEQ ID NO: 3154 - DNA, 16 bp, synthetic construct
  misc_feature 1..16: note = Description of Artificial Sequence: Syntheticoligonucleotide
  source 1..16: mol_type = other DNA
ccactgatgctgggac

SEQ ID NO: 3155 - DNA, 16 bp, synthetic construct
  misc_feature 1..16: note = Description of Artificial Sequence: Syntheticoligonucleotide
  source 1..16: mol_type = other DNA
gacactcgagaccata

SEQ ID NO: 3156 - DNA, 16 bp, synthetic construct
  misc_feature 1..16: note = Description of Artificial Sequence: Syntheticoligonucleotide
  source 1..16: mol_type = other DNA
gtaacttgcacaccaa

SEQ ID NO: 3157 - DNA, 16 bp, synthetic construct
  misc_feature 1..16: note = Description of Artificial Sequence: Syntheticoligonucleotide
  source 1..16: mol_type = other DNA
cctggatggtggttta

SEQ ID NO: 3158 - DNA, 16 bp, synthetic construct
  misc_feature 1..16: note = Description of Artificial Sequence: Syntheticoligonucleotide
  source 1..16: mol_type = other DNA
gttacaaggaaaggtt

SEQ ID NO: 3159 - DNA, 16 bp, synthetic construct
  misc_feature 1..16: note = Description of Artificial Sequence: Syntheticoligonucleotide
  source 1..16: mol_type = other DNA
atatctggtatcatgt

SEQ ID NO: 3160 - DNA, 16 bp, synthetic construct
  misc_feature 1..16: note = Description of Artificial Sequence: Syntheticoligonucleotide
  source 1..16: mol_type = other DNA
tgattgcagtgaggct

SEQ ID NO: 3161 - DNA, 16 bp, synthetic construct
  misc_feature 1..16: note = Description of Artificial Sequence: Syntheticoligonucleotide
  source 1..16: mol_type = other DNA
agggacatggttaggt

SEQ ID NO: 3162 - DNA, 16 bp, synthetic construct
  misc_feature 1..16: note = Description of Artificial Sequence: Syntheticoligonucleotide
  source 1..16: mol_type = other DNA
gtaatcagggacagga

SEQ ID NO: 3163 - DNA, 16 bp, synthetic construct
  misc_feature 1..16: note = Description of Artificial Sequence: Syntheticoligonucleotide
  source 1..16: mol_type = other DNA
gcacattccccaaact

SEQ ID NO: 3164 - DNA, 16 bp, synthetic construct
  misc_feature 1..16: note = Description of Artificial Sequence: Syntheticoligonucleotide
  source 1..16: mol_type = other DNA
aactttgcttttatac

SEQ ID NO: 3165 - DNA, 16 bp, synthetic construct
  misc_feature 1..16: note = Description of Artificial Sequence: Syntheticoligonucleotide
  source 1..16: mol_type = other DNA
gtccgcctggcagtgc

SEQ ID NO: 3166 - DNA, 16 bp, synthetic construct
  misc_feature 1..16: note = Description of Artificial Sequence: Syntheticoligonucleotide
  source 1..16: mol_type = other DNA
gaggaactctgggaat

SEQ ID NO: 3167 - DNA, 16 bp, synthetic construct
  misc_feature 1..16: note = Description of Artificial Sequence: Syntheticoligonucleotide
  source 1..16: mol_type = other DNA
tgttgtggaggaactc

SEQ ID NO: 3168 - DNA, 16 bp, synthetic construct
  misc_feature 1..16: note = Description of Artificial Sequence: Syntheticoligonucleotide
  source 1..16: mol_type = other DNA
gttgtttgagtgtact

SEQ ID NO: 3169 - DNA, 16 bp, synthetic construct
  misc_feature 1..16: note = Description of Artificial Sequence: Syntheticoligonucleotide
  source 1..16: mol_type = other DNA
gcagctttgaggttgt

SEQ ID NO: 3170 - DNA, 16 bp, synthetic construct
  misc_feature 1..16: note = Description of Artificial Sequence: Syntheticoligonucleotide
  source 1..16: mol_type = other DNA
gtgattgtgtgatgat

SEQ ID NO: 3171 - DNA, 16 bp, synthetic construct
  misc_feature 1..16: note = Description of Artificial Sequence: Syntheticoligonucleotide
  source 1..16: mol_type = other DNA
agatacacaggtgaat

SEQ ID NO: 3172 - DNA, 16 bp, synthetic construct
  misc_feature 1..16: note = Description of Artificial Sequence: Syntheticoligonucleotide
  source 1..16: mol_type = other DNA
tgggagtgaggtgagt

SEQ ID NO: 3173 - DNA, 16 bp, synthetic construct
  misc_feature 1..16: note = Description of Artificial Sequence: Syntheticoligonucleotide
  source 1..16: mol_type = other DNA
cgccgtgcctacctcc

SEQ ID NO: 3174 - DNA, 16 bp, synthetic construct
  misc_feature 1..16: note = Description of Artificial Sequence: Syntheticoligonucleotide
  source 1..16: mol_type = other DNA
actgtaccagagggcc

SEQ ID NO: 3175 - DNA, 16 bp, synthetic construct
  misc_feature 1..16: note = Description of Artificial Sequence: Syntheticoligonucleotide
  source 1..16: mol_type = other DNA
caattgatgaattcat

SEQ ID NO: 3176 - DNA, 16 bp, synthetic construct
  misc_feature 1..16: note = Description of Artificial Sequence: Syntheticoligonucleotide
  source 1..16: mol_type = other DNA
atttcaagttgttcaa

SEQ ID NO: 3177 - DNA, 16 bp, synthetic construct
  misc_feature 1..16: note = Description of Artificial Sequence: Syntheticoligonucleotide
  source 1..16: mol_type = other DNA
tgtacaaagctctagg

SEQ ID NO: 3178 - DNA, 16 bp, synthetic construct
  misc_feature 1..16: note = Description of Artificial Sequence: Syntheticoligonucleotide
  source 1..16: mol_type = other DNA
taagtgctcagcttgc

SEQ ID NO: 3179 - DNA, 16 bp, synthetic construct
  misc_feature 1..16: note = Description of Artificial Sequence: Syntheticoligonucleotide
  source 1..16: mol_type = other DNA
acaatggtgtgaagtg

SEQ ID NO: 3180 - DNA, 16 bp, synthetic construct
  misc_feature 1..16: note = Description of Artificial Sequence: Syntheticoligonucleotide
  source 1..16: mol_type = other DNA
gattctaatttggtta

SEQ ID NO: 3181 - DNA, 16 bp, synthetic construct
  misc_feature 1..16: note = Description of Artificial Sequence: Syntheticoligonucleotide
  source 1..16: mol_type = other DNA
tatagcatgattctaa

SEQ ID NO: 3182 - DNA, 16 bp, synthetic construct
  misc_feature 1..16: note = Description of Artificial Sequence: Syntheticoligonucleotide
  source 1..16: mol_type = other DNA
ccaacaatcggcactt

SEQ ID NO: 3183 - DNA, 16 bp, synthetic construct
  misc_feature 1..16: note = Description of Artificial Sequence: Syntheticoligonucleotide
  source 1..16: mol_type = other DNA
gcacgccccctttgcc

SEQ ID NO: 3184 - DNA, 16 bp, synthetic construct
  misc_feature 1..16: note = Description of Artificial Sequence: Syntheticoligonucleotide
  source 1..16: mol_type = other DNA
acaaccttttggaagg

SEQ ID NO: 3185 - DNA, 16 bp, synthetic construct
  misc_feature 1..16: note = Description of Artificial Sequence: Syntheticoligonucleotide
  source 1..16: mol_type = other DNA
aaaagcatgaatggcc

SEQ ID NO: 3186 - DNA, 16 bp, synthetic construct
  misc_feature 1..16: note = Description of Artificial Sequence: Syntheticoligonucleotide
  source 1..16: mol_type = other DNA
tatatatgtaatggct

SEQ ID NO: 3187 - DNA, 16 bp, synthetic construct
  misc_feature 1..16: note = Description of Artificial Sequence: Syntheticoligonucleotide
  source 1..16: mol_type = other DNA
gcagtacatatgagga

SEQ ID NO: 3188 - DNA, 16 bp, synthetic construct
  misc_feature 1..16: note = Description of Artificial Sequence: Syntheticoligonucleotide
  source 1..16: mol_type = other DNA
ggtactattataacca

SEQ ID NO: 3189 - DNA, 16 bp, synthetic construct
  misc_feature 1..16: note = Description of Artificial Sequence: Syntheticoligonucleotide
  source 1..16: mol_type = other DNA
taagttttaacaccta

SEQ ID NO: 3190 - DNA, 16 bp, synthetic construct
  misc_feature 1..16: note = Description of Artificial Sequence: Syntheticoligonucleotide
  source 1..16: mol_type = other DNA
gagaactgaatttgtg

SEQ ID NO: 3191 - DNA, 16 bp, synthetic construct
  misc_feature 1..16: note = Description of Artificial Sequence: Syntheticoligonucleotide
  source 1..16: mol_type = other DNA
atttgctggtctctgg

SEQ ID NO: 3192 - DNA, 16 bp, synthetic construct
  misc_feature 1..16: note = Description of Artificial Sequence: Syntheticoligonucleotide
  source 1..16: mol_type = other DNA
tcaagttgacaattgc

SEQ ID NO: 3193 - DNA, 16 bp, synthetic construct
  misc_feature 1..16: note = Description of Artificial Sequence: Syntheticoligonucleotide
  source 1..16: mol_type = other DNA
ggagtagacaagggcc

SEQ ID NO: 3194 - DNA, 16 bp, synthetic construct
  misc_feature 1..16: note = Description of Artificial Sequence: Syntheticoligonucleotide
  source 1..16: mol_type = other DNA
gccgctgcatttcggt

SEQ ID NO: 3195 - DNA, 16 bp, synthetic construct
  misc_feature 1..16: note = Description of Artificial Sequence: Syntheticoligonucleotide
  source 1..16: mol_type = other DNA
ttggatttcaactctg

SEQ ID NO: 3196 - DNA, 16 bp, synthetic construct
  misc_feature 1..16: note = Description of Artificial Sequence: Syntheticoligonucleotide
  source 1..16: mol_type = other DNA
ctgacctatggagtcc

SEQ ID NO: 3197 - DNA, 16 bp, synthetic construct
  misc_feature 1..16: note = Description of Artificial Sequence: Syntheticoligonucleotide
  source 1..16: mol_type = other DNA
gactgacatgcctcca

SEQ ID NO: 3198 - DNA, 16 bp, synthetic construct
  misc_feature 1..16: note = Description of Artificial Sequence: Syntheticoligonucleotide
  source 1..16: mol_type = other DNA
gccccacaatcaaggt

SEQ ID NO: 3199 - DNA, 16 bp, synthetic construct
  misc_feature 1..16: note = Description of Artificial Sequence: Syntheticoligonucleotide
  source 1..16: mol_type = other DNA
cccaaagtctcagtat

SEQ ID NO: 3200 - DNA, 16 bp, synthetic construct
  misc_feature 1..16: note = Description of Artificial Sequence: Syntheticoligonucleotide
  source 1..16: mol_type = other DNA
gccactatgacaagcc

SEQ ID NO: 3201 - DNA, 16 bp, synthetic construct
  misc_feature 1..16: note = Description of Artificial Sequence: Syntheticoligonucleotide
  source 1..16: mol_type = other DNA
acagcccccgacttgc

SEQ ID NO: 3202 - DNA, 16 bp, synthetic construct
  misc_feature 1..16: note = Description of Artificial Sequence: Syntheticoligonucleotide
  source 1..16: mol_type = other DNA
agatacattctcagac

SEQ ID NO: 3203 - DNA, 16 bp, synthetic construct
  misc_feature 1..16: note = Description of Artificial Sequence: Syntheticoligonucleotide
  source 1..16: mol_type = other DNA
gatgttttccaccact

SEQ ID NO: 3204 - DNA, 16 bp, synthetic construct
  misc_feature 1..16: note = Description of Artificial Sequence: Syntheticoligonucleotide
  source 1..16: mol_type = other DNA
gggtggttgtcagagc

SEQ ID NO: 3205 - DNA, 16 bp, synthetic construct
  misc_feature 1..16: note = Description of Artificial Sequence: Syntheticoligonucleotide
  source 1..16: mol_type = other DNA
tgagggaagcactggc

SEQ ID NO: 3206 - DNA, 16 bp, synthetic construct
  misc_feature 1..16: note = Description of Artificial Sequence: Syntheticoligonucleotide
  source 1..16: mol_type = other DNA
atgctacaccccctgc

SEQ ID NO: 3207 - DNA, 16 bp, synthetic construct
  misc_feature 1..16: note = Description of Artificial Sequence: Syntheticoligonucleotide
  source 1..16: mol_type = other DNA
ggagttggattgggtg

SEQ ID NO: 3208 - DNA, 16 bp, synthetic construct
  misc_feature 1..16: note = Description of Artificial Sequence: Syntheticoligonucleotide
  source 1..16: mol_type = other DNA
gtcaaagtgacatggg

SEQ ID NO: 3209 - DNA, 16 bp, synthetic construct
  misc_feature 1..16: note = Description of Artificial Sequence: Syntheticoligonucleotide
  source 1..16: mol_type = other DNA
tcaggagcagtgctag

SEQ ID NO: 3210 - DNA, 16 bp, synthetic construct
  misc_feature 1..16: note = Description of Artificial Sequence: Syntheticoligonucleotide
  source 1..16: mol_type = other DNA
tcggagtcctattttg

SEQ ID NO: 3211 - DNA, 16 bp, synthetic construct
  misc_feature 1..16: note = Description of Artificial Sequence: Syntheticoligonucleotide
  source 1..16: mol_type = other DNA
ctctggtcaaagcagg

SEQ ID NO: 3212 - DNA, 16 bp, synthetic construct
  misc_feature 1..16: note = Description of Artificial Sequence: Syntheticoligonucleotide
  source 1..16: mol_type = other DNA
ccagtgccacagtaaa

SEQ ID NO: 3213 - DNA, 16 bp, synthetic construct
  misc_feature 1..16: note = Description of Artificial Sequence: Syntheticoligonucleotide
  source 1..16: mol_type = other DNA
ctcccgcccagtgcca

SEQ ID NO: 3214 - DNA, 16 bp, synthetic construct
  misc_feature 1..16: note = Description of Artificial Sequence: Syntheticoligonucleotide
  source 1..16: mol_type = other DNA
atgggactacaatacg

SEQ ID NO: 3215 - DNA, 16 bp, synthetic construct
  misc_feature 1..16: note = Description of Artificial Sequence: Syntheticoligonucleotide
  source 1..16: mol_type = other DNA
tcacctacttggcccc

SEQ ID NO: 3216 - DNA, 16 bp, synthetic construct
  misc_feature 1..16: note = Description of Artificial Sequence: Syntheticoligonucleotide
  source 1..16: mol_type = other DNA
tgatcatccccctttt

SEQ ID NO: 3217 - DNA, 16 bp, synthetic construct
  misc_feature 1..16: note = Description of Artificial Sequence: Syntheticoligonucleotide
  source 1..16: mol_type = other DNA
ctgtggttcagcctga

SEQ ID NO: 3218 - DNA, 16 bp, synthetic construct
  misc_feature 1..16: note = Description of Artificial Sequence: Syntheticoligonucleotide
  source 1..16: mol_type = other DNA
gtggagtttccaagcc

SEQ ID NO: 3219 - DNA, 16 bp, synthetic construct
  misc_feature 1..16: note = Description of Artificial Sequence: Syntheticoligonucleotide
  source 1..16: mol_type = other DNA
gctctgtggttttgtg

SEQ ID NO: 3220 - DNA, 16 bp, synthetic construct
  misc_feature 1..16: note = Description of Artificial Sequence: Syntheticoligonucleotide
  source 1..16: mol_type = other DNA
tttgtaaagctctgtg

SEQ ID NO: 3221 - DNA, 16 bp, synthetic construct
  misc_feature 1..16: note = Description of Artificial Sequence: Syntheticoligonucleotide
  source 1..16: mol_type = other DNA
agagaagcttaaagac

SEQ ID NO: 3222 - DNA, 16 bp, synthetic construct
  misc_feature 1..16: note = Description of Artificial Sequence: Syntheticoligonucleotide
  source 1..16: mol_type = other DNA
gcatcttactacttat

SEQ ID NO: 3223 - DNA, 16 bp, synthetic construct
  misc_feature 1..16: note = Description of Artificial Sequence: Syntheticoligonucleotide
  source 1..16: mol_type = other DNA
gcagattctagagcct

SEQ ID NO: 3224 - DNA, 16 bp, synthetic construct
  misc_feature 1..16: note = Description of Artificial Sequence: Syntheticoligonucleotide
  source 1..16: mol_type = other DNA
atgttggaagtgtggt

SEQ ID NO: 3225 - DNA, 16 bp, synthetic construct
  misc_feature 1..16: note = Description of Artificial Sequence: Syntheticoligonucleotide
  source 1..16: mol_type = other DNA
cctggcagtgcctaag

SEQ ID NO: 3226 - DNA, 16 bp, synthetic construct
  misc_feature 1..16: note = Description of Artificial Sequence: Syntheticoligonucleotide
  source 1..16: mol_type = other DNA
ttcctttataccagcc

SEQ ID NO: 3227 - DNA, 16 bp, synthetic construct
  misc_feature 1..16: note = Description of Artificial Sequence: Syntheticoligonucleotide
  source 1..16: mol_type = other DNA
tgaatgtgaggttagg

SEQ ID NO: 3228 - DNA, 16 bp, synthetic construct
  misc_feature 1..16: note = Description of Artificial Sequence: Syntheticoligonucleotide
  source 1..16: mol_type = other DNA
ggatcttagagtcaga

SEQ ID NO: 3229 - DNA, 16 bp, synthetic construct
  misc_feature 1..16: note = Description of Artificial Sequence: Syntheticoligonucleotide
  source 1..16: mol_type = other DNA
atagctggtcctgctg

SEQ ID NO: 3230 - DNA, 16 bp, synthetic construct
  misc_feature 1..16: note = Description of Artificial Sequence: Syntheticoligonucleotide
  source 1..16: mol_type = other DNA
tgtggtcgccatcttg

SEQ ID NO: 3231 - DNA, 16 bp, synthetic construct
  misc_feature 1..16: note = Description of Artificial Sequence: Syntheticoligonucleotide
  source 1..16: mol_type = other DNA
ctgtacattcgcatca

SEQ ID NO: 3232 - DNA, 16 bp, synthetic construct
  misc_feature 1..16: note = Description of Artificial Sequence: Syntheticoligonucleotide
  source 1..16: mol_type = other DNA
gaggtggaatcccaca

SEQ ID NO: 3233 - DNA, 16 bp, synthetic construct
  misc_feature 1..16: note = Description of Artificial Sequence: Syntheticoligonucleotide
  source 1..16: mol_type = other DNA
agctggagtccagagt

SEQ ID NO: 3234 - DNA, 16 bp, synthetic construct
  misc_feature 1..16: note = Description of Artificial Sequence: Syntheticoligonucleotide
  source 1..16: mol_type = other DNA
ttgcaccacttctgcc

SEQ ID NO: 3235 - DNA, 16 bp, synthetic construct
  misc_feature 1..16: note = Description of Artificial Sequence: Syntheticoligonucleotide
  source 1..16: mol_type = other DNA
gctattttatgggtcc

SEQ ID NO: 3236 - DNA, 16 bp, synthetic construct
  misc_feature 1..16: note = Description of Artificial Sequence: Syntheticoligonucleotide
  source 1..16: mol_type = other DNA
aatgggtgttacaagg

SEQ ID NO: 3237 - DNA, 16 bp, synthetic construct
  misc_feature 1..16: note = Description of Artificial Sequence: Syntheticoligonucleotide
  source 1..16: mol_type = other DNA
ggaatatctggtatca

SEQ ID NO: 3238 - DNA, 16 bp, synthetic construct
  misc_feature 1..16: note = Description of Artificial Sequence: Syntheticoligonucleotide
  source 1..16: mol_type = other DNA
gtggttaggctcaggg

SEQ ID NO: 3239 - DNA, 16 bp, synthetic construct
  misc_feature 1..16: note = Description of Artificial Sequence: Syntheticoligonucleotide
  source 1..16: mol_type = other DNA
tggtttgaattatcga

SEQ ID NO: 3240 - DNA, 16 bp, synthetic construct
  misc_feature 1..16: note = Description of Artificial Sequence: Syntheticoligonucleotide
  source 1..16: mol_type = other DNA
ggcaggtaatcaggga

SEQ ID NO: 3241 - DNA, 16 bp, synthetic construct
  misc_feature 1..16: note = Description of Artificial Sequence: Syntheticoligonucleotide
  source 1..16: mol_type = other DNA
caccgttgagagctgc

SEQ ID NO: 3242 - DNA, 16 bp, synthetic construct
  misc_feature 1..16: note = Description of Artificial Sequence: Syntheticoligonucleotide
  source 1..16: mol_type = other DNA
gggcgaggctcctgag

SEQ ID NO: 3243 - DNA, 16 bp, synthetic construct
  misc_feature 1..16: note = Description of Artificial Sequence: Syntheticoligonucleotide
  source 1..16: mol_type = other DNA
taaactgaggcctgca

SEQ ID NO: 3244 - DNA, 16 bp, synthetic construct
  misc_feature 1..16: note = Description of Artificial Sequence: Syntheticoligonucleotide
  source 1..16: mol_type = other DNA
ccgttgagagctgcag

SEQ ID NO: 3245 - DNA, 16 bp, synthetic construct
  misc_feature 1..16: note = Description of Artificial Sequence: Syntheticoligonucleotide
  source 1..16: mol_type = other DNA
accgttgagagctgca

SEQ ID NO: 3246 - DNA, 16 bp, synthetic construct
  misc_feature 1..16: note = Description of Artificial Sequence: Syntheticoligonucleotide
  source 1..16: mol_type = other DNA
tgggcgaggctcctga

SEQ ID NO: 3247 - DNA, 20 bp, synthetic construct
  misc_feature 1..20: note = Description of Artificial Sequence: Syntheticoligonucleotide
  source 1..20: mol_type = other DNA
ccttccctgaaggttcctcc

SEQ ID NO: 3248 - DNA, 20 bp, synthetic construct
  misc_feature 1..20: note = Description of Artificial Sequence: Syntheticprimer
  source 1..20: mol_type = other DNA
caaatggtgtctgcaagtgg

SEQ ID NO: 3249 - DNA, 20 bp, synthetic construct
  misc_feature 1..20: note = Description of Artificial Sequence: Syntheticprimer
  source 1..20: mol_type = other DNA
ctctggaggagacattgtgc

SEQ ID NO: 3250 - DNA, 23 bp, synthetic construct
  misc_feature 1..23: note = Description of Artificial Sequence: Syntheticprobe
  source 1..23: mol_type = other DNA
cctggcagtgcttgaggaagtcc

SEQ ID NO: 3251 - DNA, 19 bp, synthetic construct
  misc_feature 1..19: note = Description of Artificial Sequence: Syntheticprimer
  source 1..19: mol_type = other DNA
gaaggtgaaggtcggagtc

SEQ ID NO: 3252 - DNA, 20 bp, synthetic construct
  misc_feature 1..20: note = Description of Artificial Sequence: Syntheticprimer
  source 1..20: mol_type = other DNA
gaagatggtgatgggatttc

SEQ ID NO: 3253 - DNA, 20 bp, synthetic construct
  misc_feature 1..20: note = Description of Artificial Sequence: Syntheticprobe
  source 1..20: mol_type = other DNA
caagcttcccgttctcagcc

What is claimed:

1. A compound comprising a modified oligonucleotide 8 to 80 linked nucleosides in length having a nucleobase sequence comprising at least 8 contiguous nucleobases of any of the nucleobase sequences of SEQ ID NOs: 9-3246.

2. A compound comprising a modified oligonucleotide 9 to 80 linked nucleosides in length having a nucleobase sequence comprising at least 9 contiguous nucleobases of any of the nucleobase sequences of SEQ ID NOs: 9-3246.

3. A compound comprising a modified oligonucleotide 10 to 80 linked nucleosides in length having a nucleobase sequence comprising at least 10 contiguous nucleobases of any of the nucleobase sequences of SEQ ID NOs: 9-3246.

4. A compound comprising a modified oligonucleotide 11 to 80 linked nucleosides in length having a nucleobase sequence comprising at least 11 contiguous nucleobases of any of the nucleobase sequences of SEQ ID NOs: 9-3246.

5. A compound comprising a modified oligonucleotide 12 to 80 linked nucleosides in length having a nucleobase sequence comprising at least 12 contiguous nucleobases of any of the nucleobase sequences of SEQ ID NOs: 9-3246.

6. A compound comprising a modified oligonucleotide 16 to 80 linked nucleosides in length having a nucleobase sequence comprising the nucleobase sequence of any one of SEQ ID NOs: 9-3246.

7. A compound comprising a modified oligonucleotide having a nucleobase sequence consisting of any one of SEQ ID NOs: 9-3246.

8. A compound comprising a modified oligonucleotide 8 to 80 linked nucleosides in length complementary within nucleotides 2269-2284 of SEQ ID NO: 1 or within nucleotides 1233-1248, 2156-2171, 2735-2750, 4661-4676, 7307-7322, 7331-7346, 7980-7995, 11581-11596, or 12396-12411 of SEQ ID NO: 2.

9. A compound comprising a modified oligonucleotide 8 to 80 linked nucleosides in length having a nucleobase sequence comprising any one of SEQ ID NOs: 449, 501, 544, 794, 1293, 1307, 1511, 1755, 2492, or 2575.

10. A compound comprising a modified oligonucleotide having a nucleobase sequence consisting of any one of SEQ ID NOs: 449, 501, 544, 794, 1293, 1307, 1511, 1755, 2492, or 2575.

11. The compound of any one of claims 1-10, wherein the modified oligonucleotide comprises at least one modified internucleoside linkage, at least one modified sugar, or at least one modified nucleobase.

12. The compound of claim 11, wherein the modified internucleoside linkage is a phosphorothioate internucleoside linkage.

13. The compound of claim 11 or 12, wherein the modified sugar is a bicyclic sugar.

14. The compound of claim 13, wherein the bicyclic sugar is selected from the group consisting of: 4′-(CH₂)—O-2′ (LNA); 4′-(CH₂)₂—O-2′ (ENA); and 4′-CH(CH₃)—O-2′ (cEt).

15. The compound of claim 11 or 12, wherein the modified sugar is 2′-O-methoxyethyl.

16. The compound of any one of claims 11-15, wherein the modified nucleobase is a 5-methylcytosine.

17. The compound of any one of claims 1-16, wherein the modified oligonucleotide comprises:
a gap segment consisting of linked deoxynucleosides;
a 5′ wing segment consisting of linked nucleosides; and
a 3′ wing segment consisting of linked nucleosides;
wherein the gap segment is positioned between the 5′ wing segment and the 3′ wing segment and wherein each nucleoside of each wing segment comprises a modified sugar.

18. A compound comprising a modified oligonucleotide 16 to 80 linked nucleosides in length having a nucleobase sequence comprising any one of SEQ ID NOs: 449, 501, 544, 794, 1293, 1307, 1511, 1755, 2492, or 2575, wherein the modified oligonucleotide comprises:
a gap segment consisting of linked deoxynucleosides;
a 5′ wing segment consisting of linked nucleosides; and
a 3′ wing segment consisting of linked nucleosides;
wherein the gap segment is positioned between the 5′ wing segment and the 3′ wing segment and wherein each nucleoside of each wing segment comprises a modified sugar.

19. A compound comprising a modified oligonucleotide 16-80 linked nucleobases in length having a nucleobase sequence comprising the sequence recited in any one of SEQ ID NOs: 449, 501, 544, 794, 1293, 1307, 1511, 1755, 2492, or 2575, wherein the modified oligonucleotide comprises:
a gap segment consisting of ten linked deoxynucleosides;
a 5′ wing segment consisting of three linked nucleosides; and
a 3′ wing segment consisting of three linked nucleosides;
wherein the gap segment is positioned between the 5′ wing segment and the 3′ wing segment; wherein each nucleoside of each wing segment comprises a cEt nucleoside; wherein each internucleoside linkage is a phosphorothioate linkage; and wherein each cytosine is a 5-methylcytosine.

20. A compound comprising a modified oligonucleotide 16-80 linked nucleobases in length having a nucleobase sequence comprising the sequence recited in SEQ ID NO: 449, wherein the modified oligonucleotide comprises:
a gap segment consisting of ten linked deoxynucleosides;
a 5′ wing segment consisting of three linked nucleosides; and
a 3′ wing segment consisting of three linked nucleosides;
wherein the gap segment is positioned between the 5′ wing segment and the 3′ wing segment; wherein each nucleoside of each wing segment comprises a cEt nucleoside; wherein each internucleoside linkage is a phosphorothioate linkage; and wherein each cytosine is a 5-methylcytosine.

21. The compound of any one of claims 1-20, wherein the oligonucleotide is at least 80%, 85%, 90%, 95% or 100% complementary to any of SEQ ID NOs: 1-5.

22. The compound of any one of claims 1-21, wherein the compound is single-stranded.

23. The compound of any one of claims 1-21, wherein the compound is double-stranded.

24. The compound of any one of claims 1-23, wherein the compound comprises ribonucleotides.

25. The compound of any one of claims 1-23, wherein the compound comprises deoxyribonucleotides.

26. The compound of any one of claims 1-25, wherein the modified oligonucleotide consists of 16 to 30 linked nucleosides.

27. The compound of any preceding claim, wherein the compound consists of the modified oligonucleotide.

28. A compound consisting of a pharmaceutically acceptable salt of any of the compounds of claims 1-27.

29. The compound of claim 28, wherein the pharmaceutically acceptable salt is a sodium salt.

30. The compound of claim 28, wherein the pharmaceutically acceptable salt is a potassium salt.

31. A compound having the formula: [chemical structure]
or a salt thereof.

32. A compound having the formula:

[chemical structure]

33. A composition comprising the compound of any one of claims 1-32 and a pharmaceutically acceptable carrier.

34. A composition comprising a compound or modified oligonucleotide of any preceding claim, for use in therapy.

35. A method of treating or ameliorating cancer in an individual comprising administering to the individual a compound targeted to FOXP3, thereby treating or ameliorating the cancer.

36. The method of claim 35, wherein the compound is an antisense compound targeted to FOXP3.

37. The method of claim 35 or 36, wherein the cancer is a cancer having FOXP3 positive (FOXP3+) Tregs in the microenvironment or stroma or tumor draining lymph nodes, lung cancer, non-small cell lung carcinoma (NSCLC), small-cell lung carcinoma (SCLC), squamous cell carcinoma (SCC), head and neck cancer, head and neck squamous cell carcinoma (HNSCC), gastrointestinal cancer, large intestinal cancer, small intestinal cancer, stomach cancer, colon cancer, colorectal cancer, bladder cancer, liver cancer, hepatocellular carcinoma (HCC), esophageal cancer, pancreatic cancer, biliary tract cancer, gastric cancer, urothelial cancer, breast cancer, triple-negative breast cancer (TNBC), ovarian cancer, endometrial cancer, cervical cancer, prostate cancer, mesothelioma, sarcomas (e.g. epitheloid, rhabdoid and synovial), chordoma, renal cancer, renal cell carcinoma (RCC), brain cancer, neuroblastoma, glioblastoma, skin cancer, melanoma, basal cell carcinoma, merkel cell carcinoma, blood cancer, hematopoetic cancer, myeloma, multiple myeloma (MM), B cell malignancies, lymphoma, B cell lymphoma, Hodgkin lymphoma, T cell lymphoma, leukemia, or acute lymphocytic leukemia (ALL).

38. The method of any of claims 40-42, wherein administering the compound inhibits or reduces immunosuppression, Treg immunosuppressive activity, cancer cell proliferation, tumor growth, or metastasis, or induces or activates anticancer or antitumor immunity; anticancer or antitumor immune response; immune cell activation or infiltration; inflammatory cell activation or infiltration; effector immune cell activation or infiltration; T cell activation or infiltration; CD8 T cell activation or infiltration; NK cell activation or infiltration; macrophage and dendritic cell activation or infiltration; inflammation; or inflammatory cytokine or chemokine expression.

39. A method of inhibiting expression of FOXP3 in a cell comprising contacting the cell with a compound targeted to FOXP3, thereby inhibiting expression of FOXP3 in the cell.

40. The method of claim 39, wherein the cell is a cancer cell.

41. The method of claim 40, wherein the cancer is a cancer having FOXP3 positive (FOXP3+) Tregs in the microenvironment or stroma or tumor draining lymph nodes, lung cancer, non-small cell lung carcinoma (NSCLC), small-cell lung carcinoma (SCLC), squamous cell carcinoma (SCC), head and neck cancer, head and neck squamous cell carcinoma (HNSCC), gastrointestinal cancer, large intestinal cancer, small intestinal cancer, stomach cancer, colon cancer, colorectal cancer, bladder cancer, liver cancer, hepatocellular carcinoma (HCC), esophageal cancer, pancreatic cancer, biliary tract cancer, gastric cancer, urothelial cancer, breast cancer, triple-negative breast cancer (TNBC), ovarian cancer, endometrial cancer, cervical cancer, prostate cancer, mesothelioma, sarcomas (e.g. epitheloid, rhabdoid and synovial), chordoma, renal cancer, renal cell carcinoma (RCC), brain cancer, neuroblastoma, glioblastoma, skin cancer, melanoma, basal cell carcinoma, merkel cell carcinoma, blood cancer, hematopoetic cancer, myeloma, multiple myeloma (MM), B cell malignancies, lymphoma, B cell lymphoma, Hodgkin lymphoma, T cell lymphoma, leukemia, or acute lymphocytic leukemia (ALL).

42. A method of reducing or inhibiting immunosuppression, Treg immunosuppressive activity, cancer cell proliferation, tumor growth, or metastasis in an individual having cancer comprising administering a compound targeted to FOXP3 to the individual, thereby reducing or inhibiting immunosuppression, Treg immunosuppressive activity, cancer cell proliferation, tumor growth, or metastasis in the individual.

43. A method of inducing or activating anticancer or antitumor immunity; anticancer or antitumor immune response; immune cell activation or infiltration; inflammatory cell activation or infiltration; effector immune cell activation or infiltration; T cell activation or infiltration; CD8 T cell activation or infiltration; NK cell activation or infiltration; macrophage and dendritic cell activation or infiltration; inflammation; or inflammatory cytokine or chemokine expression in an individual having cancer comprising administering a compound targeted to FOXP3 to the individual.

44. The method of claim 43, wherein the individual has a cancer having FOXP3 positive (FOXP3+) Tregs in the microenvironment or stroma or tumor draining lymph nodes, lung cancer, non-small cell lung carcinoma (NSCLC), small-cell lung carcinoma (SCLC), squamous cell carcinoma (SCC), head and neck cancer, head and neck squamous cell carcinoma (HNSCC), gastrointestinal cancer, large intestinal cancer, small intestinal cancer, stomach cancer, colon cancer, colorectal cancer, bladder cancer, liver cancer, hepatocellular carcinoma (HCC), esophageal cancer, pancreatic cancer, biliary tract cancer, gastric cancer, urothelial cancer, breast cancer, triple-negative breast cancer (TNBC), ovarian cancer, endometrial cancer, cervical cancer, prostate cancer, mesothelioma, sarcomas (e.g. epitheloid, rhabdoid and synovial), chordoma, renal cancer, renal cell carcinoma (RCC), brain cancer, neuroblastoma, glioblastoma, skin cancer, melanoma, basal cell carcinoma, merkel cell carcinoma, blood cancer, hematopoetic cancer, myeloma, multiple myeloma (MM), B cell malignancies, lymphoma, B cell lymphoma, Hodgkin lymphoma, T cell lymphoma, leukemia, or acute lymphocytic leukemia (ALL).

45. The method of any one of claims 35-44, wherein the compound is an antisense compound targeted to FOXP3.

46. The method of any one of claims 35-45, wherein the compound is the compound of any one of claims 1-34 or composition of claim 35 or 36.

47. The method of any of claims 35-46, wherein the compound is administered parenterally.

48. Use of a compound targeted to FOXP3 for treating, preventing, or ameliorating cancer.

49. The use of claim 48, wherein the cancer is a cancer having FOXP3 positive (FOXP3+) Tregs in the microenvironment or stroma or tumor draining lymph nodes, lung cancer, non-small cell lung carcinoma (NSCLC), small-cell lung carcinoma (SCLC), squamous cell carcinoma (SCC), head and neck cancer, head and neck squamous cell carcinoma (HNSCC), gastrointestinal cancer, large intestinal cancer, small intestinal cancer, stomach cancer, colon cancer, colorectal cancer, bladder cancer, liver cancer, hepatocellular carcinoma (HCC), esophageal cancer, pancreatic cancer, biliary tract cancer, gastric cancer, urothelial cancer, breast cancer, triple-negative breast cancer (TNBC), ovarian cancer, endometrial cancer, cervical cancer, prostate cancer, mesothelioma, sarcomas (e.g. epitheloid, rhabdoid and synovial), chordoma, renal cancer, renal cell carcinoma (RCC), brain cancer, neuroblastoma, glioblastoma, skin cancer, melanoma, basal cell carcinoma, merkel cell carcinoma, blood cancer, hematopoetic cancer, myeloma, multiple myeloma (MM), B cell malignancies, lymphoma, B cell lymphoma, Hodgkin lymphoma, T cell lymphoma, leukemia, or acute lymphocytic leukemia (ALL).

50. The use of claim 48 or 49, wherein the compound is an antisense compound targeted to FOXP3.

51. The use of any one of claims 48-50, wherein the compound is the compound of any one of claims 1-32 or composition of claim 33 or 34.

52. Use of a compound targeted to FOXP3 in the manufacture of a medicament for treating or ameliorating cancer.

53. The use of claim 51, wherein the cancer is a cancer having FOXP3 positive (FOXP3+) Tregs in the microenvironment or stroma or tumor draining lymph nodes, lung cancer, non-small cell lung carcinoma (NSCLC), small-cell lung carcinoma (SCLC), squamous cell carcinoma (SCC), head and neck cancer, head and neck squamous cell carcinoma (HNSCC), gastrointestinal cancer, large intestinal cancer, small intestinal cancer, stomach cancer, colon cancer, colorectal cancer, bladder cancer, liver cancer, hepatocellular carcinoma (HCC), esophageal cancer, pancreatic cancer, biliary tract cancer, gastric cancer, urothelial cancer, breast cancer, triple-negative breast cancer (TNBC), ovarian cancer, endometrial cancer, cervical cancer, prostate cancer, mesothelioma, sarcomas (e.g. epitheloid, rhabdoid and synovial), chordoma, renal cancer, renal cell carcinoma (RCC), brain cancer, neuroblastoma, glioblastoma, skin cancer, melanoma, basal cell carcinoma, merkel cell carcinoma, blood cancer, hematopoetic cancer, myeloma, multiple myeloma (MM), B cell malignancies, lymphoma, B cell lymphoma, Hodgkin lymphoma, T cell lymphoma, leukemia, or acute lymphocytic leukemia (ALL).

54. The use of claim 52 or 53, wherein the compound is an antisense compound targeted to FOXP3.

55. The use of any one of claims 52-54, wherein the compound is the compound of any one of claims 1-32 or composition of claim 33 or 34.

56. Use of a compound targeted to FOXP3 in the preparation of a medicament for treating or ameliorating cancer.

57. The use of claim 56, wherein the cancer is a cancer having FOXP3 positive (FOXP3+) Tregs in the microenvironment or stroma or tumor draining lymph nodes, lung cancer, non-small cell lung carcinoma (NSCLC), small-cell lung carcinoma (SCLC), squamous cell carcinoma (SCC), head and neck cancer, head and neck squamous cell carcinoma (HNSCC), gastrointestinal cancer, large intestinal cancer, small intestinal cancer, stomach cancer, colon cancer, colorectal cancer, bladder cancer, liver cancer, hepatocellular carcinoma (HCC), esophageal cancer, pancreatic cancer, biliary tract cancer, gastric cancer, urothelial cancer, breast cancer, triple-negative breast cancer (TNBC), ovarian cancer, endometrial cancer, cervical cancer, prostate cancer, mesothelioma, sarcomas (e.g. epitheloid, rhabdoid and synovial), chordoma, renal cancer, renal cell carcinoma (RCC), brain cancer, neuroblastoma, glioblastoma, skin cancer, melanoma, basal cell carcinoma, merkel cell carcinoma, blood cancer, hematopoetic cancer, myeloma, multiple myeloma (MM), B cell malignancies, lymphoma, B cell lymphoma, Hodgkin lymphoma, T cell lymphoma, leukemia, or acute lymphocytic leukemia (ALL).

58. The use of claim 56 or 57, wherein the compound is an antisense compound targeted to FOXP3.

59. The use of any one of claims 56-58, wherein the compound is the compound of any one of claims 1-32 or composition of claim 33 or 34.
